(19) United States
(12) Patent Application Publication
(10) Pub. No.: US 2022/0177587 A1
(43) Pub. Date: Jun. 9, 2022

(54) METHODS AND USES OF VARIANT CD80 FUSION PROTEINS AND RELATED CONSTRUCTS

(71) Applicant: Alpine Immune Sciences, Inc., Seattle, WA (US)

(72) Inventors: Ryan SWANSON, Seattle, WA (US); Mark F. MAURER, Seattle, WA (US); Stanford L. PENG, Seattle, WA (US); Jing YANG, Seattle, WA (US); Kristine M. SWIDEREK, Seattle, WA (US)

(73) Assignee: Alpine Immune Sciences, Inc., Seattle, WA (US)

(21) Appl. No.: 17/275,646

(22) PCT Filed: Sep. 19, 2019
(86) PCT No.: PCT/US2019/052022

§ 371 Date: Mar. 11, 2021

Related U.S. Application Data
(60) Provisional application No. 62/818,058, filed on Mar. 13, 2019.
(60) Provisional application No. 62/733,623, filed on Sep. 19, 2018.
(60) Provisional application No. 62/733,625, filed on Sep. 19, 2018.

(51) Int. Cl. C07K 16/28; A61K 31/282; C07K 14/705; C12N 15/62; A61P 35/00; A61K 45/06

(52) U.S. Cl. CPC C07K 16/2818; A61K 31/282; C07K 14/70532; A61K 2039/505; A61P 35/00; A61K 45/06; C12N 15/62

(57) ABSTRACT

Provided herein are variant CD80 polypeptides, immunomodulatory proteins comprising variant CD80 polypeptides, and nucleic acids encoding such proteins. The immunomodulatory proteins provide therapeutic utility for a variety of oncological conditions. Compositions and methods for making and using such proteins are provided.

### CROSS-REFERENCE TO RELATED APPLICATIONS

[0001] This application claims priority from U.S. provisional application No. 62/733,625, filed Sep. 19, 2018, entitled “METHODS AND USES OF VARIANT CD80 FUSION PROTEINS AND RELATED CONSTRUCTS”; U.S. provisional application No. 62/733,623, filed Sep. 19, 2018, entitled “VARIANT CD80 FUSION PROTEINS AND RELATED COMPOSITIONS AND METHODS”; and U.S. provisional application No. 62/818,058, filed Mar. 13, 2019, entitled “METHODS AND USES OF VARIANT CD80 FUSION PROTEINS AND RELATED CONSTRUCTS”, the contents of each of which are incorporated by reference in their entirety.

### INCORPORATION BY REFERENCE OF SEQUENCE LISTING

[0002] The present application is being filed along with a Sequence Listing in electronic format. The Sequence Listing is provided as a file entitled 761612003040SeqList.txt, created Sep. 18, 2019, which is 2,178,803 bytes in size. The information in the electronic format of the Sequence Listing is incorporated by reference in its entirety.

### FIELD

[0003] The present disclosure relates to therapeutic compositions for modulating immune response in the treatment of cancer and methods of using the same. In some aspects, the present disclosure relates to particular variants of CD80 that exhibit altered binding, such as binding affinity or selectivity, for a cognate binding partner, such as increased affinity for CD28, PD-L1, and/or CTLA-4.

### BACKGROUND

[0004] Modulation of the immune response by intervening in the processes that occur in the immunological synapse (IS) formed by and between antigen-presenting cells (APCs) or target cells and lymphocytes is of increasing medical interest. Mechanistically, cell surface proteins in the IS can involve the coordinated and often simultaneous interaction of multiple protein targets with a single protein to which they bind. IS interactions occur in close association with the junction of two cells, and a single protein in this structure can interact with both a protein on the same cell (cis) as well as a protein on the associated cell (trans), likely at the same time. Although therapeutics are known that can modulate the IS, improved therapeutics are needed. Provided are immunomodulatory proteins, including soluble proteins or transmembrane immunomodulatory proteins capable of being expressed on cells, that meet such needs.

### SUMMARY

[0005] Provided herein are methods of treating a cancer in a subject. In some embodiments, the method includes administering to a subject having a cancer a variant CD80 fusion protein that specifically binds to PD-L1, said variant CD80 fusion protein comprising a variant CD80 extracellular domain or a portion thereof comprising an IgV domain or a specific binding fragment thereof and a multimerization domain, wherein the variant CD80 extracellular domain or the portion thereof comprises one or more amino acid modifications at one or more positions in the sequence of amino acids of the extracellular domain or a portion thereof of an unmodified CD80 polypeptide; and administering to the subject a therapeutically effective amount of an anti-cancer agent.

[0006] In some embodiments, the anti-cancer agent is an immune checkpoint inhibitor or a chemotherapeutic agent. In some embodiments, the anti-cancer agent is a chemotherapeutic agent that is a platinum-based chemotherapeutic agent. In some embodiments, the chemotherapeutic agent is oxilaplatin. In some embodiments, the anti-cancer agent is an immune checkpoint inhibitor of CTLA-4, optionally wherein the checkpoint inhibitor is an anti-CTLA-4 antibody or an antigen-binding fragment thereof. In some embodiments, the immune checkpoint inhibitor is ipilimumab or tremelimumab, or an antigen binding fragment thereof. In some embodiments, the anti-cancer agent is an immune checkpoint inhibitor of PD-1 (PD-1 inhibitor), optionally wherein the PD-1 inhibitor is an anti-PD-1 antibody or antigen binding fragment thereof.

[0007] Provided herein are methods of treating a cancer in a subject. In some embodiments, the method includes administering to a subject having a cancer a variant CD80 fusion protein that specifically binds to PD-L1, said variant CD80 fusion protein comprising a variant CD80 extracellular domain or a portion thereof comprising an IgV domain or a specific binding fragment thereof and a multimerization domain, wherein the variant CD80 extracellular domain or the portion thereof contains one or more amino acid modifications at one or more positions in the sequence of amino acids of the extracellular domain or a portion thereof of an unmodified CD80 polypeptide; and administering to the subject a therapeutically effective amount of a PD-1 inhibitor, wherein the PD-1 inhibitor disrupts the interaction between Programmed Death-1 (PD-1) and a ligand thereof.

[0008] In some embodiments, the ligand is Programmed Death Ligand-1 (PD-L1) or PD-L2. In some embodiments, the PD-1 inhibitor specifically binds to PD-1. In some embodiment, the PD-1 inhibitor does not compete with the variant CD80 fusion protein for binding to PD-L1. In some embodiments, the PD-1 inhibitor is a peptide, protein, antibody or antigen-binding fragment thereof, or a small molecule. In some embodiments, the PD-1 inhibitor is an antibody or antigen-binding fragment thereof that specifically binds to PD-1. In some examples, the antibody or antigen-binding portion is selected from nivolumab, pembrolizumab, MEDI0680 (AMP514), PDR001, cemiplimab (REGN2810), pidilizumab (CT011), or an antigen-binding portion thereof.

[0009] In some embodiments, the PD-1 inhibitor contains the extracellular domain of PD-L2 or a portion thereof that binds to PD-1, and an Fc region. In some embodiments, the PD-1 inhibitor is AMP-224.

[0010] In some embodiments, the initiation of the administration of the PD-1 inhibitor is carried out concurrently or sequentially with the initiation of the administration of the variant CD80 fusion protein. In some examples, the initiation of the administration of the PD-1 inhibitor is after the initiation of the administration of the variant CD80 fusion protein. In some embodiments, the initiation of the administration of the anti-PD-1 antibody is after the administration of the last dose of a therapeutically effective amount of the variant CD80 fusion protein. In some of any such embodiments, the variant CD80 fusion protein is administered in a therapeutically effective amount as a single dose or in six or fewer multiple doses.

[0011] Provided herein are methods of treating a cancer in a subject. In some embodiments, the method includes administering to a subject having a cancer a therapeutically effective amount of a variant CD80 fusion protein, said variant CD80 fusion protein comprising a variant CD80 extracellular domain or a portion thereof comprising an IgV domain or a specific binding fragment thereof and a multimerization domain, wherein the variant CD80 extracellular domain or the portion thereof contains one or more amino acid modifications at one or more positions in the sequence of amino acids of the extracellular domain or a portion thereof of an unmodified CD80 polypeptide, wherein the therapeutically effective amount of the variant CD80 fusion protein is administered as a single dose or in six or fewer multiple doses.

[0012] In some embodiments, the variant CD80 fusion protein, e.g. variant CD80 Fc fusion, is administered parenterally. In some embodiments, the variant CD80 fusion protein, e.g. variant CD80 Fc fusion, is administered subcutaneously. In some embodiments, the variant CD80 Fc fusion protein is administered intravenously. In some embodiments, the administration is by injection in which the injection is a bolus injection.

[0013] In embodiments of any of the provided methods, the therapeutically effective amount that is administered is between about 0.5 mg/kg and about 40 mg/kg, about 0.5 mg/kg and about 30 mg/kg, about 0.5 mg/kg and about 20 mg/kg, about 0.5 mg/kg and about 18 mg/kg, about 0.5 mg/kg and about 12 mg/kg, about 0.5 mg/kg and about 10 mg/kg, about 0.5 mg/kg and about 6 mg/kg, about 0.5 mg/kg and about 3 mg/kg, about 1 mg/kg and about 40 mg/kg, about 1 mg/kg and about 30 mg/kg, about 1 mg/kg and about 20 mg/kg, about 1 mg/kg and about 18 mg/kg, about 1 mg/kg and about 12 mg/kg, about 1 mg/kg and about 10 mg/kg, about 1 mg/kg and about 6 mg/kg, about 1 mg/kg and about 3 mg/kg, about 3 mg/kg and about 40 mg/kg, about 3 mg/kg and about 30 mg/kg, about 3 mg/kg and about 20 mg/kg, about 3 mg/kg and about 18 mg/kg, about 3 mg/kg and about 12 mg/kg, about 3 mg/kg and about 10 mg/kg, about 3 mg/kg and about 6 mg/kg, about 6 mg/kg and about 40 mg/kg, about 6 mg/kg and about 30 mg/kg, about 6 mg/kg and about 20 mg/kg, about 6 mg/kg and about 18 mg/kg, about 6 mg/kg and about 12 mg/kg, about 6 mg/kg and about 10 mg/kg, about 10 mg/kg and about 40 mg/kg, about 10 mg/kg and about 30 mg/kg, about 10 mg/kg and about 20 mg/kg, about 10 mg/kg and about 18 mg/kg, about 10 mg/kg and about 12 mg/kg, about 12 mg/kg and about 40 mg/kg, about 12 mg/kg and about 30 mg/kg, about 12 mg/kg and about 20 mg/kg, about 12 mg/kg and about 18 mg/kg, about 18 mg/kg and about 40 mg/kg, about 18 mg/kg and about 30 mg/kg, about 18 mg/kg and about 20 mg/kg, about 20 mg/kg and about 40 mg/kg, about 20 mg/kg and about 30 mg/kg or about 30 mg/kg and about 40 mg/kg, each inclusive. In some embodiments, the therapeutically effective amount is between about 3.0 mg/kg and 18 mg/kg, inclusive. In some embodiments, the therapeutically effective amount is between about 6 mg/kg and about 20 mg/kg, inclusive.

[0014] In some of any such embodiments, the therapeutically effective amount is between about 1 mg/kg and about 10 mg/kg, inclusive. In some embodiments, the therapeutically effective amount is between about 2.0 mg/kg and about 6.0 mg/kg, inclusive. In some embodiments, the variant CD80 fusion protein, e.g. variant CD80 Fc fusion, is administered intratumorally.

[0015] Provided herein are methods of treating a cancer in a subject. In some embodiments, the method includes intratumorally administering to a subject having a cancer a therapeutically effective amount of a variant CD80 fusion protein, said variant CD80 fusion protein comprising a variant CD80 extracellular domain or a portion thereof comprising an IgV domain or a specific binding fragment thereof and a multimerization domain, wherein the variant CD80 extracellular domain or the portion thereof contains one or more amino acid modifications at one or more positions in the sequence of amino acids of the extracellular domain or a portion thereof of an unmodified CD80 polypeptide. In some of any such embodiments, the variant CD80 fusion protein is administered in a therapeutically effective amount as a single dose or in six or fewer multiple doses. In some embodiments, the therapeutically effective amount is between about 0.1 mg/kg and about 1 mg/kg, inclusive. In some examples, the therapeutically effective amount is between about 0.2 mg/kg and about 0.6 mg/kg. In some embodiments, the therapeutically effective amount is administered in a single dose.

[0016] In some of any such provided embodiments, the therapeutically effective amount is administered in six or fewer multiple doses and the six or fewer multiple doses is two doses, three doses, four doses, five doses or six doses. In some embodiment, the therapeutically effective amount is administered in four doses. In some embodiments, the therapeutically effective amount is administered in three doses. In some examples, the therapeutically effective amount is administered in two doses.

[0017] In some embodiments, each dose of the multiple dose is administered weekly, every two weeks, every three weeks or every four weeks. In some embodiments, each of the six or fewer multiple doses is administered weekly, every two weeks, every three weeks, or every four weeks. In some aspects, the interval between each multiple dose is about a week.

[0018] In some of any of the provided embodiments, the single dose or each of the multiple doses, such as each of the six of fewer multiple doses, is administered in an amount between about 0.5 mg/kg and about 10 mg/kg once every week (Q1W).

[0019] Provided herein are methods of treating a cancer in a subject, the method including administering to a subject having a cancer a variant CD80 fusion protein in an amount of between about 1.0 mg/kg to 10 mg/kg, inclusive, once every week (Q1W), said variant CD80 fusion protein comprising a variant CD80 extracellular domain or a portion thereof comprising an IgV domain or a specific binding fragment thereof and a multimerization domain, wherein the variant CD80 extracellular domain or the portion thereof comprises one or more amino acid modifications at one or more positions in the sequence of amino acids of the extracellular domain or a portion thereof of an unmodified CD80 polypeptide.

[0020] In some embodiments the amount of the variant CD80 fusion protein administered Q1W is between about 1 mg/kg and about 3 mg/kg.

[0021] In some of any of the provided embodiments, the single dose or each of the multiple doses, such as each of the six or fewer multiple doses, is administered in an amount between about 1.0 mg/kg and about 40 mg/kg once every three weeks (Q3W).

[0022] Provided herein are methods of treating a cancer in a subject, the method including administering to a subject having a cancer a variant CD80 fusion protein in an amount of between about 1.0 mg/kg to 40 mg/kg, inclusive, once every three weeks (Q3W), said variant CD80 fusion protein comprising a variant CD80 extracellular domain or a portion thereof comprising an IgV domain or a specific binding fragment thereof and a multimerization domain, wherein the variant CD80 extracellular domain or the portion thereof comprises one or more amino acid modifications at one or more positions in the sequence of amino acids of the extracellular domain or a portion thereof of an unmodified CD80 polypeptide.

[0023] In some embodiments, the amount of the variant CD80 fusion protein administered Q3W is between about 3.0 mg/kg and about 10 mg/kg Q3W.

[0024] In some of any of the provided embodiments, the variant CD80 fusion protein is administered parenterally, optionally subcutaneously. In some embodiments, the variant CD80 fusion protein is administered by injection that is a bolus injection.

[0025] In some of any of the provided embodiments, the administration is for more than one week. In some examples, the therapeutically effective amount is administered in a time period of no more than six weeks. In some embodiments, the therapeutically effective amount is administered in a time period of no more than four weeks or about four weeks. In some embodiment, each multiple dose is an equal amount.

[0026] In some of any such embodiments, the method includes prior to the administering, selecting a subject for treatment that has a tumor comprising cells surface positive for PD-L1 or CD28 and/or surface negative for a cell surface ligand selected from CD80 or CD86. In some embodiments, a subject is selected for treatment that has a tumor comprising cells that are surface positive for PD-L1. In some embodiments, a subject is selected for treatment that has a tumor comprising cells that are surface positive for CD28. In some embodiments, a subject is selected for treatment that has a tumor comprising cells that are surface negative for CD80. In some embodiments, a subject is selected for treatment that has a tumor comprising cells that are surface negative for CD86. In particular aspects, such cells are tumor cells. In particular aspects, such cells are tumor infiltrating immune cells, such as tumor infiltrating T lymphocytes.

[0027] Provided herein are methods of treating a cancer in a subject, the method including administering a variant CD80 fusion protein to a subject selected as having a tumor containing cells surface negative for a cell surface ligand selected from CD80 or CD86, and/or surface positive for CD28, wherein the variant CD80 fusion protein contains a variant CD80 extracellular domain or a portion thereof comprising an IgV domain or a specific binding fragment thereof and a multimerization domain, said variant CD80 extracellular domain or the portion thereof comprising one or more amino acid modifications at one or more positions in the sequence of amino acids of the extracellular domain or a portion thereof of an unmodified CD80 polypeptide.

[0028] In some embodiments, the cells surface negative for CD80 or CD86 contain tumor cells or antigen presenting cells. In some embodiments, the cells surface positive for CD28 contain tumor infiltrating T lymphocytes. In some examples, the subject has further been selected as having a tumor comprising cells surface positive for PD-L1. In some embodiments, the cells surface positive for PD-L1 are tumor cells or tumor infiltrating immune cells, optionally tumor infiltrating T lymphocytes.

[0029] In some embodiments, the method includes determining an immunoscore based on the presence or density of tumor infiltrating T lymphocytes in the tumor of the subject. In some embodiments, the subject is selected for treatment if the immunoscore is low. In some of any such embodiments, a subject is selected by immunohistochemistry (IHC) using a reagent that specifically binds to the at least one binding partner.

[0030] In some embodiments, the variant CD80 fusion protein exhibits increased binding to at least one binding partner selected from among CD28, PD-L1 and CTLA-4 compared to a fusion protein comprising the extracellular domain of the unmodified CD80 for the at least one binding partner. In some examples, the variant CD80 fusion protein exhibits increased binding to PD-L1 compared to a fusion protein comprising the extracellular domain of the unmodified CD80 for the binding partner. In some embodiments, the variant CD80 fusion protein further exhibits increased binding to at least one binding partner selected from among CD28 and CTLA-4 compared to a fusion protein comprising the extracellular domain of the unmodified CD80 for the at least one binding partner. In some of any such embodiments, the binding, such as affinity, is increased more than 1.2-fold, 1.5-fold, 2-fold, 3-fold, 4-fold, 5-fold, 6-fold, 7-fold, 8-fold, 9-fold, 10-fold, 20-fold, 30-fold, 40-fold, 50-fold, 60-fold, 80-fold, 100-fold, 150-fold, 200-fold, 250-fold, 300-fold, 400-fold, or 450-fold compared to the binding, such as affinity, of the unmodified CD80 for the ectodomain of the binding partner.

[0031] In some embodiments, the variant CD80 fusion protein exhibits increased binding to at least one binding partner selected from among CD28, PD-L1 and CTLA-4 compared to a fusion protein comprising the extracellular domain or portion thereof of the unmodified CD80 for the at least one binding partner. In some examples, the variant CD80 fusion protein exhibits increased binding to PD-L1 compared to a fusion protein comprising the extracellular domain or portion thereof of the unmodified CD80 for the binding partner PD-L1. In some embodiments, the variant CD80 fusion protein further exhibits increased binding to at least one binding partner selected from among CD28 and CTLA-4 compared to a fusion protein comprising the extracellular domain or portion thereof of the unmodified CD80 for the at least one binding partner. In some of any such embodiments, the binding affinity is increased more than 1.2-fold, 1.5-fold, 2-fold, 3-fold, 4-fold, 5-fold, 6-fold, 7-fold, 8-fold, 9-fold, 10-fold, 20-fold, 30-fold, 40-fold, 50-fold, 60-fold, 80-fold, 100-fold, 150-fold, 200-fold, 250-fold, 300-fold, 400-fold, or 450-fold compared to binding affinity of the unmodified CD80 for the ectodomain of the binding partner.

[0032] In some of any of the provided embodiments, the one or more amino acid modifications are amino acid substitutions. In some examples, the one or more amino acid modifications contain one or more amino acid substitutions selected from among H18Y, A26E, E35D, D46E, D46V, M47I, M47L, M47V, V68M, A71D, A71G, L85M, L85Q or D90G, with reference to numbering of SEQ ID NO:2, or a conservative amino acid substitution thereof. In some embodiments, the one or more amino acid modifications contain two or more amino acid substitutions selected from among H18Y, A26E, E35D, D46E, D46V, M47I, M47L, M47V, V68M, A71D, A71G, L85M, L85Q or D90G, with reference to numbering of SEQ ID NO:2, or a conservative amino acid substitution thereof.

[0033] In some examples, the one or more amino acid modifications contain amino acid substitutions H18Y/E35D, E35D/D46E, E35D/D46V, E35D/M47I, E35D/M47L, E35D/M47V, E35D/V68M, E35D/L85M, E35D/L85Q, D46E/M47I, D46E/M47L, D46E/M47V, D46V/M47I, D46V/M47L, D46V/M47L, D46E/V68M, D46V/V68M, H18Y/M47I, H18Y/M47L, H18Y/M47V, M47I/V68M, M47L/V68M or M47V/V68M, M47I/E85M, M47L/E85M, M47V/E85M, M47I/E85Q, M47L/E85Q or M47V/E85Q, with reference to numbering of SEQ ID NO:2. In some embodiments, the one or more amino acid modifications contain amino acid substitutions E35D/M47L/V68M, E35D/M47V/V68M or E35D/M47I/L70M.

[0034] In some of any such embodiments, the one or more amino acid modifications contain amino acid substitutions E35D/M47V/N48K/V68M/K89N.

[0035] In some of any such embodiments, the one or more amino acid modifications contain amino acid substitutions H18Y/A26E/E35D/M47L/V68M/A71G/D90G.

[0036] In some of any such embodiments, the one or more amino acid modifications contain amino acid substitutions E35D/D46E/M47V/V68M/D90G/K93E.

[0037] In some of any such embodiments, the one or more amino acid modifications contain amino acid substitutions E35D/D46V/M47L/V68M/L85Q/E88D.

[0038] In some of any such embodiments, the unmodified CD80 is a human CD80.

[0039] In some of any such embodiments, the extracellular domain or portion thereof of the unmodified CD80 contains (i) the sequence of amino acids set forth in SEQ ID NO:2, (ii) a sequence of amino acids that has at least 95% sequence identity to SEQ ID NO:2; or (iii) is a portion of (i) or (ii) comprising an IgV domain or a specific binding fragment thereof.

[0040] In some embodiments, the extracellular domain or portion thereof of the unmodified CD80 is an extracellular domain portion that is or contains the IgV domain or a specific binding fragment thereof. In some embodiments, the extracellular domain portion of the unmodified CD80 contains the IgV domain but does not contain the IgC domain or a portion of the IgC domain. In some embodiments, the extracellular domain portion of the unmodified CD80 is set forth as the sequence of amino acids 35-135 of SEQ ID NO:2 (SEQ ID NO:76) or 35-141 of SEQ ID NO:2 (SEQ ID NO:150). In some embodiments, the variant CD80 extracellular domain or portion thereof is an extracellular domain portion that does not contain the IgC domain or a portion of the IgC domain.

[0041] In some embodiments, the variant CD80 extracellular domain contains the sequence of amino acids 35-135 of SEQ ID NO:2 (SEQ ID NO:76) or 35-141 of SEQ ID NO:2 (SEQ ID NO:150) in which is contained the one or more amino acid substitutions. In some embodiments, the variant CD80 extracellular domain is the sequence of amino acids 35-135 of SEQ ID NO:2 (SEQ ID NO:76) or 35-141 of SEQ ID NO:2 (SEQ ID NO:150) in which is contained the one or more amino acid substitutions. In some embodiments, the variant CD80 extracellular domain 1, 2, 3, 4, 5, 6, 7, 8, 9, 10, 11, 12, 13, 14, 15, 16, 17, 18, 19 or 20 amino acid modifications, optionally wherein the amino acid modifications are amino acid substitutions.

[0042] In some of any such embodiments, the variant CD80 extracellular domain contains no more than 1, 2, 3, 4, 5, 6, 7, 8, 9, 10, 11, 12 or 13 amino acid modifications. In some of any such embodiments, the variant CD80 extracellular domain or the portion thereof contains no more than 1, 2, 3, 4, 5, 6, 7, 8, 9, 10, 11, 12 or 13 amino acid modifications. In some such embodiments, the amino acid modifications are amino acid substitutions. In some embodiments, the amino acid sequence of the variant CD80 extracellular domain has at least or at least about 85%, 86%, 87%, 88%, 89%, 90%, 91%, 92%, 93%, 94%, 95%, 96%, 97%, 98%, 99% or more sequence identity to the sequence of amino acids 35-135 of SEQ ID NO:2 (SEQ ID NO:76) or 35-141 of SEQ ID NO:2 (SEQ ID NO:150).

[0043] In some of any such embodiments, the multimerization domain is an Fc region. In some embodiments, the Fc region is of an immunoglobulin G1 (IgG1) or an immunoglobulin G2 (IgG2) protein. In some embodiments, the Fc region exhibits one or more effector functions. In some embodiments, the Fc region is a variant Fc region comprising one or more amino acid substitutions in a wildtype Fc region, said variant Fc region exhibiting one or more effector function that is reduced compared to the wildtype Fc region, such as reduced compared to the wildtype human Fc is of human IgG1.

[0044] In some embodiments, the Fc region contains the amino acid substitution N297G, wherein the residue is numbered according to the EU index of Kabat. In some embodiments, the Fc region contains the amino acid substitutions R292C/N297G/V302C, wherein the residue is numbered according to the EU index of Kabat. In some embodiments, the Fc region contains the amino acid substitutions L234A/L235E/G237A, wherein the residue is numbered according to the EU index of Kabat. In some embodiments, the Fc region further contains the amino acid substitution C220S, wherein the residues are numbered according to the EU index of Kabat. In some embodiments, the Fc region contains K447del, wherein the residue is numbered according to the EU index of Kabat.

[0045] In some of any such embodiments, the variant CD80 fusion protein antagonizes the activity of CTLA-4. In some embodiments, the variant CD80 fusion protein blocks the PD-1/PD-L1 interaction. In some embodiments, the variant CD80 fusion proteins binds to CD28 and mediates CD28 agonism. In some embodiments, the CD28 agonism is PD-L1 dependent. In some embodiments, the subject is a human.

[0046] Provided herein are kits containing: a variant CD80 fusion protein that specifically binds to PD-L1, said variant CD80 fusion protein comprising a variant CD80 extracellular domain or a portion thereof comprising an IgV domain or a specific binding fragment thereof and a multimerization domain, wherein the variant CD80 extracellular domain or the portion thereof comprises one or more amino acid modifications at one or more positions in the sequence of amino acids of the extracellular domain or a portion thereof of an unmodified CD80 polypeptide; and an anticancer agent.

[0047] In some embodiments, the anti-cancer agent is an immune checkpoint inhibitor or a chemotherapeutic agent. In some embodiments, the anti-cancer agent is a chemotherapeutic agent that is a platinum-based chemotherapeutic agent. In some embodiments, the chemotherapeutic agent is oxilaplatin. In some embodiments, the anti-cancer agent is an immune checkpoint inhibitor of CTLA-4, optionally wherein the checkpoint inhibitor is an anti-CTLA-4 antibody or an antigen-binding fragment thereof. In some embodiments, the immune checkpoint inhibitor is ipilimumab or tremelimumab, or an antigen binding fragment thereof. In some embodiments, the anti-cancer agent is an immune checkpoint inhibitor of PD-1 (PD-1 inhibitor), optionally wherein the PD-1 inhibitor is an anti-PD-1 antibody or antigen binding fragment thereof.

[0048] Provided herein are kits containing: a variant CD80 fusion protein that specifically binds to PD-L1, said variant CD80 fusion protein comprising a variant CD80 extracellular domain or a portion thereof comprising an IgV domain or a specific binding fragment thereof and a multimerization domain, wherein the variant CD80 extracellular domain or the portion thereof contains one or more amino acid modifications at one or more positions in the sequence of amino acids of the extracellular domain or a portion thereof of an unmodified CD80 polypeptide; and a PD-1 inhibitor, wherein the PD-1 inhibitor disrupts the interaction between Programmed Death-1 (PD-1) and a ligand thereof.

[0049] In some embodiments, the ligand is Programmed Death Ligand-1 (PD-L1) or PD-L2. In some embodiments, the PD-1 inhibitor specifically binds to PD-1. In some embodiments, the PD-1 inhibitor does not compete with the variant CD80 fusion protein for binding to PD-L1. In some embodiments, the PD-1 inhibitor is a peptide, protein, antibody or antigen-binding fragment thereof, or a small molecule. In some embodiments, the PD-1 inhibitor is an antibody or antigen-binding fragment thereof that specifically binds to PD-1.

[0050] In some of any such embodiments, the antibody or antigen-binding portion is selected from nivolumab, pembrolizumab, MEDI0680 (AMP514), PDR001, cemiplimab (REGN2810), pidilizumab (CT011), or an antigen-binding portion thereof.

[0051] In some embodiments, the PD-1 inhibitor contains the extracellular domain of PD-L2 or a portion thereof that binds to PD-1, and an Fc region. In some embodiments, the PD-1 inhibitor is AMP-224. In some embodiments, the variant CD80 fusion protein exhibits increased binding to at least one binding partner selected from among CD28, PD-L1 and CTLA-4 compared to a fusion protein comprising the extracellular domain or portion thereof of the unmodified CD80 for the at least one binding partner. In some embodiments, the variant CD80 fusion protein exhibits increased binding to PD-L1 compared to a fusion protein comprising the extracellular domain or portion thereof of the unmodified CD80 for PD-1.

[0052] In some embodiments, the variant CD80 fusion protein further exhibits increased binding to at least one binding partner selected from among CD28 and CTLA-4 compared to a fusion protein comprising the extracellular domain of the unmodified CD80 for the at least one binding partner. In some embodiments, the variant CD80 fusion protein exhibits increased binding to at least one binding partner selected from among CD28 and CTLA-4 compared to a fusion protein comprising the extracellular domain or portion thereof of the unmodified CD80 for the at least one binding partner. In some embodiments, the binding, such as affinity, is increased more than 1.2-fold, 1.5-fold, 2-fold, 3-fold, 4-fold, 5-fold, 6-fold, 7-fold, 8-fold, 9-fold, 10-fold, 20-fold, 30-fold, 40-fold, 50-fold, 60-fold, 80-fold, 100-fold, 150-fold, 200-fold, 250-fold, 300-fold, 400-fold, or 450-fold compared to binding affinity of the unmodified CD80 for the ectodomain of the binding partner.

[0053] In some of any such embodiments, the one or more amino acid modifications are amino acid substitutions. In some embodiments, the one or more amino acid modifications contain one or more amino acid substitutions selected from among H18Y, A26E, E35D, D46E, D46V, M47I, M47L, M47V, V68M, A71D, A71G, L85M, L85Q or D90G, with reference to numbering of SEQ ID NO:2, or a conservative amino acid substitution thereof. In some embodiments, the one or more amino acid modifications contain two or more amino acid substitutions selected from among H18Y, A26E, E35D, D46E, D46V, M47I, M47L, M47V, V68M, A71D, A71G, L85M, L85Q or D90G, with reference to numbering of SEQ ID NO:2, or a conservative amino acid substitution thereof.

[0054] In some of any of the provided embodiments, the one or more amino acid modifications contain amino acid substitutions H18Y/E35D, E35D/D46E, E35D/D46V, E35D/M47I, E35D/M47L, E35D/M47V, E35D/V68M, E35D/L85M, E35D/L85Q, D46E/M47I, D46E/M47L, D46E/M47V, D46V/M47I, D46V/M47L, D46V/M47L, D46E/V68M, D46V/V68M, H18Y/M47I, H18Y/M47L, H18Y/M47V, M47I/V68M, M47L/V68M or M47V/V68M, M47I/E85M, M47L/E85M, M47V/E85M, M47I/E85Q, M47L/E85Q or M47V/E85Q, with reference to numbering of SEQ ID NO:2. In some embodiments, the one or more amino acid modifications contain amino acid substitutions E35D/M47L/V68M, E35D/M47V/V68M or E35D/M47I/L70M. In some embodiments, the one or more amino acid modifications contain amino acid substitutions E35D/M47V/N48K/V68M/K89N, H18Y/A26E/E35D/M47L/V68M/A71G/D90G, E35D/D46E/M47V/V68M/D90G/K93E or E35D/D46V/M47L/V68M/L85Q/E88D.

[0055] In some of any such embodiments, the unmodified CD80 is a human CD80. In some embodiments, the extracellular domain or portion thereof of the unmodified CD80 contains (i) the sequence of amino acids set forth in SEQ ID NO:2, (ii) a sequence of amino acids that has at least 95% sequence identity to SEQ ID NO:2; or (iii) is a portion of (i) or (ii) comprising an IgV domain or a specific binding fragment thereof.

[0056] In some embodiments, the extracellular domain or portion thereof of the unmodified CD80 is an extracellular domain portion that is or contains the IgV domain or a specific binding fragment thereof. In some embodiments, the extracellular domain portion of the unmodified CD80 contains the IgV domain but does not contain the IgC domain or a portion of the IgC domain.

[0057] In some embodiments, the extracellular domain portion of the unmodified CD80 is set forth as the sequence of amino acids 35-135 of SEQ ID NO:2 (SEQ ID NO:76) or 35-141 of SEQ ID NO:2 (SEQ ID NO:150). In some embodiments, the variant CD80 extracellular domain or portion thereof is an extracellular domain portion that does not contain the IgC domain or a portion of the IgC domain.

[0058] In some embodiments, the variant CD80 extracellular domain contains the sequence of amino acids 35-135 of SEQ ID NO:2 (SEQ ID NO:76) or 35-141 of SEQ ID NO:2 (SEQ ID NO:150) in which is contained the one or more amino acid substitutions. In some embodiments, the variant CD80 extracellular domain is the sequence of amino acids 35-135 of SEQ ID NO:2 (SEQ ID NO:76) or 35-141 of SEQ ID NO:2 (SEQ ID NO:150) in which is contained the one or more amino acid substitutions. In some embodiments, the variant CD80 extracellular domain 1, 2, 3, 4, 5, 6, 7, 8, 9, 10, 11, 12, 13, 14, 15, 16, 17, 18, 19 or 20 amino acid modifications, optionally wherein the amino acid modifications are amino acid substitutions.

[0059] In some embodiments, the variant CD80 extracellular domain contains no more than 1, 2, 3, 4, 5, 6, 7, 8, 9, 10, 11, 12 or 13 amino acid modifications. In some such embodiments, the amino acid modifications are amino acid substitutions. In some embodiments, the variant CD80 extracellular domain has at least or at least about 85%, 86%, 87%, 88%, 89%, 90%, 91%, 92%, 93%, 94%, 95%, 96%, 97%, 98%, 99% or more sequence identity to the sequence of amino acids 35-135 of SEQ ID NO:2 (SEQ ID NO:76) or 35-141 of SEQ ID NO:2 (SEQ ID NO:150).

[0060] In some of any such provided embodiments, the multimerization domain is an Fc region. In some embodiments, the Fc region is of an immunoglobulin G1 (IgG1) or an immunoglobulin G2 (IgG2) protein. In some embodiments, the Fc region exhibits one or more effector functions. In some embodiments, the Fc region is a variant Fc region containing one or more amino acid substitutions in a wildtype Fc region, said variant Fc region exhibiting one or more effector function that is reduced compared to the wildtype Fc region, optionally wherein the wildtype human Fc is of human IgG1.

[0061] Provided herein are articles of manufacture containing the kit of any of such embodiments and instructions for use. In some embodiments, the instructions provide information for administration of the variant CD80 fusion protein, such as variant CD80 Fc fusion protein, or PD-1 inhibitor in accord with any of the provided methods.

[0062] Provided herein is a multivalent CD80 polypeptide containing two copies of a fusion protein containing: at least two variant CD80 extracellular domains or a portion thereof comprising an IgV domain or a specific binding fragment thereof (vCD80), wherein the vCD80 contains one or more amino acid modifications at one or more positions in the sequence of amino acids of the extracellular domain or a portion thereof of an unmodified CD80 polypeptide and an Fc polypeptide.

[0063] In some embodiments, the polypeptide is tetravalent. In some embodiments, the fusion protein contains the structure: (vCD80)-Linker-Fc-Linker-(vCD80). In some embodiments, the fusion protein contains the structure: (vCD80)-Linker-(vCD80)-Linker-Fc.

[0064] In some embodiments, the vCD80 exhibits increased binding to at least one binding partner selected from among CD28, PD-L1 and CTLA-4 compared to a vCD80 comprising the extracellular domain or portion thereof of the unmodified CD80 for the at least one binding partner. In some embodiments, the vCD80 exhibits increased binding to PD-L1 compared to the extracellular domain or portion thereof of the unmodified CD80 for PD-L1. In some embodiments, the vCD80 exhibits increased binding to at least one binding partner selected from among CD28, PD-L1 and CTLA-4 compared to a vCD80 comprising the extracellular domain of the unmodified CD80 for the at least one binding partner. In some embodiments, the binding, such as affinity, is increased more than 1.2-fold, 1.5-fold, 2-fold, 3-fold, 4-fold, 5-fold, 6-fold, 7-fold, 8-fold, 9-fold, 10-fold, 20-fold, 30-fold, 40-fold, 50-fold, 60-fold, 80-fold, 100-fold, 150-fold, 200-fold, 250-fold, 300-fold, 400-fold, or 450-fold compared to binding affinity of the unmodified CD80 for the ectodomain of the binding partner.

[0065] In some embodiments, the one or more amino acid modifications are amino acid substitutions. In some embodiments, the one or more amino acid modifications contain one or more amino acid substitutions selected from among H18Y, A26E, E35D, D46E, D46V, M47I, M47L, M47V, V68M, A71D, A71G, L85M, L85Q or D90G, with reference to numbering of SEQ ID NO:2, or a conservative amino acid substitution thereof.

[0066] In some of any such embodiments, the one or more amino acid modifications are amino acid substitutions. In some embodiments, the one or more amino acid modifications contain one or more amino acid substitutions selected from among H18Y, A26E, E35D, D46E, D46V, M47I, M47L, M47V, V68M, A71D, A71G, L85M, L85Q or D90G, with reference to numbering of SEQ ID NO:2, or a conservative amino acid substitution thereof.

[0067] In some embodiments, the one or more amino acid modifications contain two or more amino acid substitutions selected from among H18Y, A26E, E35D, D46E, D46V, M47I, M47L, M47V, V68M, A71D, A71G, L85M, L85Q or D90G, with reference to numbering of SEQ ID NO:2, or a conservative amino acid substitution thereof. In some embodiments, the one or more amino acid modifications contains amino acid substitutions H18Y/E35D, E35D/D46E, E35D/D46V, E35D/M47I, E35D/M47L, E35D/M47V, E35D/V68M, E35D/L85M, E35D/L85Q, D46E/M47I, D46E/M47L, D46E/M47V, D46V/M47I, D46V/M47L, D46V/M47L, D46E/V68M, D46V/V68M, H18Y/M47I, H18Y/M47L, H18Y/M47V, M47I/V68M, M47L/V68M or M47V/V68M, M47I/E85M, M47L/E85M, M47V/E85M, M47I/E85Q, M47L/E85Q or M47V/E85Q, with reference to numbering of SEQ ID NO:2.

[0068] In some embodiments, the one or more amino acid modifications contain amino acid substitutions E35D/M47L/V68M, E35D/M47V/V68M or E35D/M47I/L70M. In some embodiments, the one or more amino acid modifications contain amino acid substitutions E35D/M47V/N48K/V68M/K89N, H18Y/A26E/E35D/M47L/V68M/A71G/D90G, E35D/D46E/M47V/V68M/D90G/K93E or E35D/D46V/M47L/V68M/L85Q/E88D. In some embodiments, the unmodified CD80 is a human CD80.

[0069] In some embodiments, the extracellular domain or portion thereof of the unmodified CD80 contains (i) the sequence of amino acids set forth in SEQ ID NO:2, (ii) a sequence of amino acids that has at least 95% sequence identity to SEQ ID NO:2; or (iii) is a portion of (i) or (ii) comprising an IgV domain or a specific binding fragment thereof. In some examples, the extracellular domain or portion thereof of the unmodified CD80 is an extracellular domain portion that is or contains the IgV domain or a specific binding fragment thereof.

[0070] In some embodiments, the extracellular domain portion of the unmodified CD80 contains the IgV domain but does not contain the IgC domain or a portion of the IgC domain. In some embodiments, the extracellular domain portion of the unmodified CD80 is set forth as the sequence of amino acids 35-135 of SEQ ID NO:2 (SEQ ID NO:76) or 35-141 of SEQ ID NO:2 (SEQ ID NO:150). In some examples, the vCD80 is an extracellular domain portion that does not contain the IgC domain or a portion of the IgC domain.

[0071] In some of any such embodiments, the vCD80 contains the sequence of amino acids 35-135 of SEQ ID NO:2 (SEQ ID NO:76) or 35-141 of SEQ ID NO:2 (SEQ ID NO:150) in which is contained the one or more amino acid substitutions. In some embodiments, the vCD80 has the sequence of amino acids 35-135 of SEQ ID NO:2 (SEQ ID NO:76) or 35-141 of SEQ ID NO:2 (SEQ ID NO:150) in which is contained the one or more amino acid substitutions. In some embodiments, the vCD80 contains 1, 2, 3, 4, 5, 6, 7, 8, 9, 10, 11, 12, 13, 14, 15, 16, 17, 18, 19 or 20 amino acid modifications, optionally wherein the amino acid modifications are amino acid substitutions. In some embodiments, the vCD80 contains no more than 1, 2, 3, 4, 5, 6, 7, 8, 9, 10, 11, 12 or 13 amino acid modifications, optionally wherein the amino acid modifications are amino acid substitutions. In some embodiments, the vCD80 has at least or at least about 85%, 86%, 87%, 88%, 89%, 90%, 91%, 92%, 93%, 94%, 95%, 96%, 97%, 98%, 99% or more sequence identity to the sequence of amino acids 35-135 of SEQ ID NO:2 (SEQ ID NO:76) or 35-141 of SEQ ID NO:2 (SEQ ID NO:150).

[0072] In some embodiments, the multimerization domain is an Fc region. In some embodiments, the Fc region is of an immunoglobulin G1 (IgG1) or an immunoglobulin G2 (IgG2) protein. In some embodiments, the Fc region exhibits one or more effector functions. In some embodiments, the Fc region is a variant Fc region comprising one or more amino acid substitutions in a wildtype Fc region, said variant Fc region exhibiting one or more effector function that is reduced compared to the wildtype Fc region, optionally wherein the wildtype human Fc is of human IgG1.

[0073] In some of any such embodiments, each vCD80 is the same. In some embodiments, the linker is a flexible linker. In some embodiments, the linker is a peptide linker. In some embodiments, the linker is GSGGGGS (SEQ ID NO:1522) or 3× GGGGS (SEQ ID NO: 1504).

[0074] Provided herein is a nucleic acid molecule encoding the multivalent CD80 polypeptide of any of any such embodiments.

[0075] Provided herein is a nucleic acid molecule encoding the fusion protein of the multivalent CD80 polypeptide of any of any such embodiments.

[0076] Provided herein is a vector containing the nucleic acid of any of such embodiments. In some embodiments, the vector is an expression vector.

[0077] Provided herein is a host cell containing the nucleic acid or the vector of any of such embodiments.

[0078] Provided herein is a method of producing a multivalent CD80 polypeptide of any of such embodiments, the method including introducing the nucleic acid of any of such embodiments or the vector of any of such embodiments into a host cell under conditions to express the protein in the cell. In some embodiments, the method includes isolating or purifying the protein containing the multivalent CD80 polypeptide.

[0079] Provided herein is an engineered cell comprising the multivalent CD80 polypeptide of any of such embodiments. In some embodiments, the multivalent CD80 polypeptide comprises a fusion protein encoded by a nucleic acid molecule operably linked to a sequence encoding a secretory signal peptide. In some embodiments, the multivalent CD80 polypeptide is capable of being secreted from the engineered cell when expressed.

[0080] Provided herein is an engineered cell, comprising the nucleic acid molecule or a vector of any of such embodiments. In some embodiments, the nucleic acid molecule comprises a sequence encoding a secretory signal peptide operably linked to the sequence encoding the fusion protein. In some embodiments, the nucleic acid molecule encodes a fusion protein of a multivalent CD80 polypeptide, wherein the multivalent CD80 polypeptide is capable of being secreted from the engineered cell when expressed. In some embodiments, the signal peptide is a non native signal sequence. In some embodiments, the signal peptide is an IgG kappa signal peptide, an IL-2 signal peptide, a CD33 signal peptide or a VH signal peptide.

[0081] In some embodiments, the nucleic acid molecule further comprises at least one promoter operably linked to control expression of the fusion protein. In some embodiments, the promoter is a constitutively active promoter. In some embodiments, the promoter is an inducible promoter. In some embodiments, the promoter is responsive to an element responsive to T-cell activation signaling, optionally wherein the promoter comprises a binding site for NFAT or a binding site for NF-κB.

[0082] In some embodiments, the cell is an immune cell, optionally an antigen presenting cell (APC) or a lymphocyte. In some embodiments, the cell is a lymphocyte that is a T cell, a B cell or an NK cell, optionally wherein the lymphocyte is a T cell that is CD4+ or CD8+. In some embodiments, the cell is a primary cell obtained from a subject, optionally wherein the subject is a human subject.

[0083] In some embodiments, the cell further comprises a chimeric antigen receptor (CAR) or an engineered T cell receptor (TCR).

[0084] Provided herein is a pharmaceutical composition containing the multivalent CD80 polypeptide of any of such embodiments.

[0085] Provided herein is a pharmaceutical composition comprising the engineered cell of any of such embodiments.

[0086] Provided herein is a variant CD80 fusion protein comprising: (i) a variant extracellular domain comprising one or more amino acid substitutions at one or more positions in the sequence of amino acids set forth as amino acid residues 35-230 of a wildtype human CD80 extracellular domain corresponding to residues set forth in SEQ ID NO:1 and (ii) an Fc region that has effector activity, wherein the extracellular domain of the variant CD80 fusion protein specifically binds to the ectodomain of human CD28 and does not bind to the ectodomain of human PD-L1 or binds to the ectodomain of PD-L1 with a similar binding affinity as the extracellular domain of the wildtype human CD80 for the ectodomain of PD-L1.

[0087] In some embodiments, the extracellular domain of the variant CD80 fusion protein exhibits increased binding affinity to the ectodomain of human CTLA-4 compared to the binding affinity of the extracellular domain of wildtype CD80 for the ectodomain of human CTLA-4. In some embodiments, the extracellular domain of the variant CD80 fusion protein exhibits increased binding affinity to the ectodomain of human CD28 compared to the binding affinity of the extracellular domain of wildtype CD80 for the ectodomain of human CD28.

[0088] In some embodiments, the wildtype human CD80 extracellular domain has the sequence of amino acids set forth in SEQ ID NO:2 or a sequence that has at least 95%, 96%, 97%, 98%, 99% or more sequence identity to SEQ ID NO:2. In some embodiments, the one or more amino acid substitutions comprise one or more amino acid substitutions selected from L70Q, K89R, D90G, D90K, A91G, F92Y, K93R, I118V, T120S or T130A, with reference to numbering set forth in SEQ ID NO:2, or a conservative amino acid substitution thereof. In some embodiments, the one or more amino acid substitutions comprise amino acid modifications L70Q/K89R, L70Q/D90G, L70Q/D90K, L70Q/A91G, L70Q/F92Y, L70Q/K93R, L70Q/I118V, L70Q/T120S, L70Q/T130A, K89R/D90G, K89R/D90K, K89R/A91G, K89R/F92Y, K89R/K93R, K89R/I118V, K89R/T120S, K89R/T130A, D90G/A91G, D90G/F92Y, D90G/K93R, D90G/I118V, D90G/T120S, D90G/T130A, D90K/A91G, D90K/F92Y, D90K/K93R, D90K/I118V, D90K/T120S, D90K/T130A, F92Y/K93R, F92Y/I118V, F92Y/T120S, F92Y/T130A, K93R/I118V, K93R/T120S, K93R/T130A, I118V/T120S, I118V/T130A or T120S/T130A.

[0089] In some embodiments, the one or more amino acid substitutions comprise one or more amino acid substitutions selected from substitutions selected from among H18Y, A26E, E35D, D46E, D46V, M47I, M47L, M47V, V68M, A71D, A71G, L85M, L85Q or D90G, with reference to numbering of SEQ ID NO:2, or a conservative amino acid substitution thereof. In some embodiments, the one or more amino acid substitutions comprises amino acid substitutions H18Y/E35D, E35D/D46E, E35D/D46V, E35D/M47I, E35D/M47L, E35D/M47V, E35D/V68M, E35D/L85M, E35D/L85Q, D46E/M47I, D46E/M47L, D46E/M47V, D46V/M47I, D46V/M47L, D46V/M47L, D46E/V68M, D46V/V68M, H18Y/M47I, H18Y/M47L, H18Y/M47V, M47I/V68M, M47L/V68M or M47V/V68M, M47I/E85M, M47L/E85M, M47V/E85M, M47I/E85Q, M47L/E85Q or M47V/E85Q, with reference to numbering of SEQ ID NO:2.

[0090] In some embodiments, the Fc region is of an immunoglobulin G1 (IgG1).

[0091] Provided herein is a nucleic acid molecule encoding the variant CD80 fusion protein of any of such embodiments.

[0092] Provided herein is a vector comprising the nucleic acid of any of such embodiments, optionally wherein the vector is an expression vector.

[0093] Provided herein is a host cell comprising the nucleic acid or the vector of any of such embodiments.

[0094] Provided herein is a method of producing a variant CD80 fusion protein of any of such embodiments, comprising introducing the nucleic acid or the vector of any of such embodiments into a host cell under conditions to express the protein in the cell, optionally wherein the method further comprises isolating or purifying the protein comprising the variant CD80 fusion protein.

[0095] Provided herein is a pharmaceutical composition comprising the variant CD80 fusion protein of any of such embodiments.

[0096] In some embodiments, the pharmaceutical composition contains a pharmaceutically acceptable excipient. In some embodiments, the pharmaceutical composition is sterile.

[0097] Provided herein is an article of manufacture containing the pharmaceutical composition of any of such embodiments in a container' in some embodiments, optionally the container is a vial. In some embodiments, the container is sealed.

[0098] Provided herein is a method of modulating an immune response in a subject, including administering the pharmaceutical composition of any of such embodiments to a subject or the multivalent CD80 polypeptide of any of such embodiments to a subject. In some embodiments, the method includes modeling the immune response treats a disease or condition in the subject.

[0099] Provided herein is a method of modulating an immune response in a subject, comprising administering the multivalent CD80 polypeptide of any of such embodiments to a subject.

[0100] Provided herein is a method of modulating an immune response in a subject, comprising administering the engineered cell of any of such embodiments to a subject. In some embodiments, the engineered cell is autologous to the subject. In some embodiments, modulating the immune response treats a disease or condition in the subject. In some embodiments, the disease or condition is a tumor or cancer.

[0101] Provided herein is a method of treating a cancer in a subject, including administering the pharmaceutical composition of any of such embodiments to a subject or the multivalent CD80 polypeptide of any of any of such embodiments to a subject.

[0102] Provided herein is a method of treating a cancer in a subject, comprising administering the pharmaceutical composition, the multivalent CD80 polypeptide, or the engineered cell of any of such embodiments to a subject.

[0103] Provided herein is a variant CD80 fusion protein containing: a variant extracellular domain comprising one or more amino acid substitutions at one or more positions in the sequence of amino acids set forth as amino acid residues 35-230 of a wildtype human CD80 extracellular domain and an Fc region that has effector activity, wherein the extracellular domain of the variant CD80 fusion protein specifically binds to the ectodomain of human CD28 and does not bind to the ectodomain of human PD-L1 or binds to the ectodomain of PD-L1 with a similar binding affinity as the extracellular domain of the wildtype human CD80 for the ectodomain of PD-L1.

[0104] In some embodiments, the extracellular domain of the variant CD80 fusion protein exhibits increased binding affinity to the ectodomain of human CTLA-4 compared to the binding affinity of the extracellular domain of wildtype CD80 for the ectodomain of human CTLA-4. In some of any such embodiments, the extracellular domain of the variant CD80 fusion protein exhibits increased binding affinity to the ectodomain of human CD28 compared to the binding affinity of the extracellular domain of wildtype CD80 for the ectodomain of human CD28. In some embodiments, the affinity is increased about or greater than 1.2-fold, 1.5-fold, 2-fold, 3-fold, 4-fold, 5-fold, 6-fold, 7-fold, 8-fold, 9-fold, 10-fold or more.

[0105] In some embodiments, the variant CD80 fusion protein increases immunological activity in a mixed lymphocyte reaction, optionally wherein the increased immunological activity includes increased production of IFN-gamma or interleukin 2 in the mixed lymphocyte reaction. In some embodiments, the variant CD80 fusion protein increases immunological activity as assessed in a T cell reporter assay incubated with antigen presenting cells. In some embodiments, the variant CD80 fusion protein increases CD28-mediated costimulation of T lymphocytes. In some aspects, the increase is by about or greater than 1.2-fold, 1.5-fold, 2-fold, 3-fold, 4-fold, 5-fold, 6-fold, 7-fold, 8-fold, 9-fold, 10-fold or more.

[0106] In some of any such embodiments, the wildtype human CD80 extracellular domain has the sequence of amino acids set forth in SEQ ID NO:2 or a sequence that has at least 95%, 96%, 97%, 98%, 99% or more sequence identity to SEQ ID NO:2. In some embodiments, the wildtype human CD80 extracellular domain has the sequence of amino acids set forth in SEQ ID NO:2.

[0107] In some embodiments the one or more amino acid substitutions contain one or more amino acid substitutions selected from L70Q, K89R, D90G, D90K, A91G, F92Y, K93R, I118V, T120S or T130A, with reference to numbering set forth in SEQ ID NO:2, or a conservative amino acid substitution thereof. In some examples, the one or more amino acid substitutions contain two or more amino acid substitutions selected from L70Q, K89R, D90G, D90K, A91G, F92Y, K93R, I118V, T120S or T130A, with reference to numbering set forth in SEQ ID NO:2, or a conservative amino acid substitution thereof.

[0108] In some embodiments, the one or more amino acid substitutions contain amino acid modifications L70Q/K89R, L70Q/D90G, L70Q/D90K, L70Q/A91G, L70Q/F92Y, L70Q/K93R, L70Q/I118V, L70Q/T120S, L70Q/T130A, K89R/D90G, K89R/D90K, K89R/A91G, K89R/F92Y, K89R/K93R, K89R/I118V, K89R/T120S, K89R/T130A, D90G/A91G, D90G/F92Y, D90G/K93R, D90G/I118V, D90G/T120S, D90G/T130A, D90K/A91G, D90K/F92Y, D90K/K93R, D90K/I118V, D90K/T120S, D90K/T130A, F92Y/K93R, F92Y/I118V, F92Y/T120S, F92Y/T130A, K93R/I118V, K93R/T120S, K93R/T130A, I118V/T120S, I118V/T130A or T120S/T130A.

[0109] In some embodiments, the one or more amino acid substitutions contain amino acid substitutions A91G/I118V/T120S/T130A. In some examples, the one or more amino acid substitutions contain amino acid substitutions S21P/L70Q/D90G/I118V/T120S/T130A. In some embodiments, the one or more amino acid substitutions contain amino acid substitutions E88D/K89R/D90K/A91G/F92Y/K93R. In some examples, the one or more amino acid substitutions contain one or more amino acid substitutions selected from substitutions selected from among H18Y, A26E, E35D, D46E, D46V, M47I, M47L, M47V, V68M, A71D, A71G, L85M, L85Q or D90G, with reference to numbering of SEQ ID NO:2, or a conservative amino acid substitution thereof.

[0110] In some of any such embodiments, the one or more amino acid substitutions contains amino acid substitutions H18Y/E35D, E35D/D46E, E35D/D46V, E35D/M47I, E35D/M47L, E35D/M47V, E35D/V68M, E35D/L85M, E35D/L85Q, D46E/M47I, D46E/M47L, D46E/M47V, D46V/M47I, D46V/M47L, D46V/M47L, D46E/V68M, D46V/V68M, H18Y/M47I, H18Y/M47L, H18Y/M47V, M47I/V68M, M47L/V68M or M47V/V68M, M47I/E85M, M47L/E85M, M47V/E85M, M47I/E85Q, M47L/E85Q or M47V/E85Q, with reference to numbering of SEQ ID NO:2. In some embodiments, the one or more amino acid modifications contain amino acid substitutions E35D/M47L/V68M, E35D/M47V/V68M or E35D/M47I/L70M.

[0111] In some embodiments, the one or more amino acid modifications contain amino acid substitutions E35D/M47V/N48K/V68M/K89N, H18Y/A26E/E35D/M47L/V68M/A71G/D90G, E35D/D46E/M47V/V68M/D90G/K93E or E35D/D46V/M47L/V68M/L85Q/E88D. In some aspects, the variant CD80 extracellular domain has 1, 2, 3, 4, 5, 6, 7, 8, 9, 10, 11, 12, 13, 14, 15, 16, 17, 18, 19 or 20 amino acid substitutions. In some examples, the variant CD80 extracellular domain contains no more than 1, 2, 3, 4, 5, 6, 7, 8, 9, 10, 11, 12 or 13 amino acid substitutions. In some embodiments, the variant CD80 extracellular domain has at least or at least about 85%, 86%, 87%, 88%, 89%, 90%, 91%, 92%, 93%, 94%, 95%, 96%, 97%, 98%, 99% or more sequence identity to the sequence of amino acids set forth in SEQ ID NO:2.

[0112] In some of any such embodiments, the Fc region is of an immunoglobulin G1 (IgG1). In some examples, the Fc region contains the amino acid substitution C220S, wherein the residues are numbered according to the EU index of Kabat. In some embodiments, the Fc region contains K447del, wherein the residue is numbered according to the EU index of Kabat.

[0113] In some aspects, the Fc region as the sequence of amino acids set forth in SEQ ID NO: 1502, 1510, 1517 or 1527. In some embodiments, the one or more effector function is selected from among antibody dependent cellular cytotoxicity (ADCC), complement dependent cytotoxicity, programmed cell death and cellular phagocytosis. In some of any such embodiments, the variant CD80 fusion protein is a dimer.

[0114] Provided herein is a nucleic acid molecule encoding the variant CD80 fusion protein of any of such embodiments.

[0115] Provided herein is a vector containing the nucleic acid of any of such embodiments. In some embodiments, the vector is an expression vector.

[0116] Provided herein is a host cell containing the nucleic acid of any of such embodiments or the vector of any of such embodiments.

[0117] Provided herein is a method of producing a variant CD80 fusion protein of any of such embodiments, including introducing the nucleic acid or the vector of any of such embodiments into a host cell under conditions to express the protein in the cell. In some embodiments, the method further includes isolating or purifying the protein containing the variant CD80 fusion protein.

[0118] Provided herein is a pharmaceutical composition containing the variant CD80 fusion protein of any of such embodiments. In some embodiments, the pharmaceutical composition contains a pharmaceutically acceptable excipient. In some embodiments, the pharmaceutical composition is sterile.

[0119] Provided herein is an article of manufacture containing the pharmaceutical composition of any of such embodiments in a container, optionally wherein the container is a vial. In some embodiments, the container is sealed.

[0120] Provided herein is a method of modulating an immune response in a subject, including administering the pharmaceutical composition of any of such embodiments to a subject or the variant CD80 fusion protein of any of any of such embodiments to a subject. In some aspects, modulating the immune response treats a disease or condition in the subject. In some examples, the disease or condition is a tumor or cancer.

[0121] Provided herein is a method of treating a cancer in a subject, including administering the pharmaceutical composition of any of such embodiments to a subject or the variant CD80 fusion protein of any of such embodiments to a subject.

### BRIEF DESCRIPTION OF THE DRAWINGS

[0122] FIG. 1A depicts an exemplary schematic of the activity of a CD80 variant IgSF domain (vIgD), conjugated to an Fc, in which the CD80-Fc blocks PD-1/PD-L1 inhibitory activity. As shown, binding of the CD80 vIgD-Fc to PD-L1, thereby antagonizing binding of PD-L1 to its cognate binding partners PD-1, and blocking PD-1 inhibitory signaling, reducing the TCR signaling threshold, and promoting T cell activation.

[0123] FIG. 1B depicts an exemplary schematic of the activity of a variant IgSF domain (vIgD)—conjugated to an Fc in which the CD80-Fc effects PD-L1-dependent CD28 agonist activity. As shown, binding of the CD80-Fc to PD-L1, expressed on the surface of a tumor cell, can prevent the association of the PD-L1 on the tumor cell and the inhibitory PD-1 receptor, expressed on the surface of a T cell. In addition, the CD80-Fc is available to bind the costimulatory CD28 receptor on the surfaces of a T cell, thereby localizing the T cell to the tumor while promoting T cell activation via CD28 costimulation of TCR signal.

[0124] FIG. 2A depicts an exemplary schematic of the activity of a variant IgSF domain (vIgD) fused to an Fc (vIgD-Fc) in which the vIgD is a variant of an IgSF domain of CD80. As shown, a soluble vIgD of CD80 interacts with its cognate binding partners to block interaction of CD80 with CTLA-4, thereby blocking the CTLA-4 inhibitory receptor, and, in some cases, allowing the T cell to differentiate into an effector phenotype.

[0125] FIG. 2B depicts an exemplary schematic of the activity of a CD80 variant IgSF domain (vIgD), conjugated to an Fc, in which the CD80-Fc blocks CTLA-4 inhibitory activity. As shown, binding of the CD80 vIgD-Fc to CTLA-4, expressed on the surface of T cells (e.g., T_{reg} and T_{eff} cells), thereby antagonizing binding of CTLA-4 to its cognate binding partners CD80 (B7-1) and CD86 (B7-2), indicated as B7, and blocking CTLA-4 inhibitory signaling, reducing the TCR signaling threshold, and promoting T cell activation.

[0126] FIG. 3 depicts various exemplary configurations of a multivalent molecule containing a first CD80 vIgD and a second CD80 vIgD. As shown, the first CD80 vIgD and second CD80 vIgD are independently linked, directly or indirectly, to the N- or C-terminus of an Fc region. For generating a homodimeric Fc molecule, the Fc region is one that is capable of forming a homodimer with a matched Fc region by co-expression of the individual Fc regions in a cell. For generating a heterodimeric Fc molecule, the individual Fc regions contain mutations (e.g., “knob-into-hole” mutations in the CH3 domain), such that formation of the heterodimer is favored compared to homodimers when the individual Fc regions are co-expressed in a cell. In some embodiments, the first CD80 vIgD and second CD80 vIgD are the same or are different. The configurations shown result in proteins that are bivalent, tetravalent, or hexavalent for one or more of its cognate binding partners.

[0127] FIG. 4 depicts binding of exemplary CD80 IgV-Fc variants to cell surface-expressed PD-L1, CD28 and CTL44 ligands.

[0128] FIG. 5 depicts dose-dependent PD-L1-dependent CD28 costimulation in a Jurkat/IL-2 reporter line induced by exemplary CD80 IgV-Fc variants.

[0129] FIG. 6 depicts human primary T cell cytokine production following PD-L1-dependent costimulation induced by exemplary CD80 IgV-Fc variants.

[0130] FIG. 7 depicts the ability of exemplary CD80 IgV-Fc candidates to bind PD-L1 and block fluorescently conjugated PD-1 binding.

[0131] FIG. 8 depicts the PD-1/PD-L1 interaction and subsequent functional activity antagonistic activity of exemplary variant CD80-Fc variants.

[0132] FIG. 9 depicts the in vivo anti-tumor activity of exemplary variant CD80 polypeptides fused to wild-type IgG1 Fc (WT Fc) or inert IgG1 Fc (inert Fc).

[0133] FIG. 10 depicts the median (left panel) and mean (right panel) tumor volumes in a mouse model following treatment with an Inert Fc control; 50 μg, 100 μg, or 500 μg of an exemplary variant CD80 IgV-Fc (inert); or 100 μg anti-PD-L1 antibody (durvalumab). All animals were treated on days 8, 10, and 12 (left three arrows on each of the left and right panels). On days 26, 28, and 31, only animals that initially received the Inert Fc control then also received 100 μg of the exemplary variant CD80 IgV-Fc (right three arrows on each of the left and right panels).

[0134] FIG. 11 depicts concentration of IFNγ in hPD-L1MC38 tumor lysates following in vivo treatment with 50 μg, 100 μg, and 500 μg of an exemplary variant CD80 IgV-Fc (inert) and 100 μg anti-PD-L1 antibody (durvalumab).

[0135] FIG. 12 depicts the median (left panel) and mean (right panel) tumor volumes in a mouse model following treatment with multiple exemplary CD80 IgV-Fc (inert) variants and anti-PD-L1 antibody (durvalumab).

[0136] FIG. 13 depicts the median (left panel) and mean (right panel) tumor volumes in mice, designated tumor-free post-treatment with exemplary CD80 IgV-Fc (inert) variants and anti-PD-L1 antibody (durvalumab), following re-challenge with huPD-L1/MC38 tumor cells.

[0137] FIG. 14 depicts detection of bound negative control Fc, CD80 variant-Fc, and anti-PD-L1 antibody by flow cytometry on single cell suspensions of live CD45 negative (CD45 neg.; CD45-) tumor cells.

[0138] FIG. 15 depicts the median (top panel) and mean (bottom panel) tumor volumes in a mouse model following treatment with an exemplary variant CD80 IgV-Fc (inert) and anti-PD-L1 antibody (durvalumab).

[0139] FIGS. 16A and 16B depict percentage of CD8 cells detected by flow cytometry in the tumor draining lymph node (FIG. 16A) and tumor (FIG. 16B) of mice treated with negative control Fc, CD80 variant-Fc, and anti-PD-L1 antibody.

[0140] FIG. 16C represents the percentage of anti-human Fc detected reagents on CD45 negative tumors treated in vivo with negative control Fc, CD80 IgV-Fc, and human anti-PD-L1 antibody.

[0141] FIG. 17 depicts specific in vitro cytotoxic activity of CD80 IgV-Fc variants against huPD-L1 transduced MC38 tumor cells but not non-transduced parental MC38, demonstrating huPDL1 specific killing.

[0142] FIGS. 18 and 19 depict the binding of CD80 IgV-Fc variants to primary human T cells (FIG. 18) and primary human monocytes (FIG. 19).

[0143] FIG. 20 depicts CD80 IgV-Fc variant antagonism of PD-L1-mediated SHP-2 recruitment to PD-1 using an enzyme complementation assay.

[0144] FIG. 21 depicts CD80 IgV-Fc variant antagonism of CD80/CTLA-4 binding.

[0145] FIG. 22A shows median tumor volumes from assessment of anti-tumor activity of an exemplary tested variant CD80 IgV-Fc alone and in combination with anti-mouse PD-1 monoclonal antibody in a syngeneic mouse melanoma model. FIG. 22B shows anti-tumor activity measured by TGI.

[0146] FIG. 23 shows IL-2 production in an assessment of T cell response with a combination of an exemplary tested variant CD80 IgV-Fc alone and in combination with an anti-PD-1 antibody.

[0147] FIG. 24A shows median tumor volumes from assessment of anti-tumor activity from treatment with IP (intraperitoneal) or IT (intratumoral injections) with variant CD80 IgV-Fc.

[0148] FIG. 24B shows percent of cells detected using huIgG among CD45-negative cell subset from mice treated IP (intraperitoneal) or IT (intratumoral injections) with variant CD80 IgV-Fc.*, **, **** p<0.05, 0.001, 0.0001, respectively, vs Fc control group by 1-way ANOVA.

[0149] FIG. 24C shows percent of cells detected using huIgG among PD-L1+CD45− cell subset from mice treated IP (intraperitoneal) or IT (intratumoral injections) with variant CD80 IgV-Fc. *, **** p<0.05, 0.0001, respectively, vs Fc control group by 1-way ANOVA.

[0150] FIG. 25 shows evaluation percentage of p15e tetramer+CD8+ T cells among total cells in the tumors from mice treated IP (intraperitoneal) or IT (intratumoral injections) with variant CD80 IgV-Fc. *, *** p<0.05 or 0.001, respectively, vs Fc control group by 1-way ANOVA.

[0151] FIG. 26A-26B shows results from assessment of blocking of the PD-L1/PD-1 and CTLA-4/CD80 interaction by exemplary multivalent variant CD80 IgSF domain fusion proteins.

[0152] FIG. 27 shows IL-2 production in an assessment of Cytomegalovirus (CMV) antigen specific T cell response with exemplary multivalent variant CD80 IgSF domain fusion proteins.

[0153] FIG. 28A shows observed (circles) and predicted (mouse PK model; solid lines) serum concentration in control mice (non-tumor bearing) for dose groups over days.

[0154] FIG. 28B shows the goodness of fit for the mouse PK model. The top left scatter plot compares observations of serum concentration against predicted values at the population level. The top right scatter plot compares observations of serum concentration against predicted values at the individual level. In both plots, the dotted line represents unity. The bottom left and right plots show the distribution of weighted residuals for population predictions and time.

[0155] FIGS. 29A-29F show model predicted serum concentration values (median and confidence intervals (CI)) compared to observed serum concentration values in a mouse tumor model (murine colon adenocarcinoma MC38 cells expressing human PD-L1) where the animals have been treated. Data and prediction for groups of mice treated with CD80 IgV-Fc (H18Y/A26E/E35D/M47L/V68M/A71G/D90G) are shown for following dosages: a single dose of 100 μg (FIG. 29A; median and 80% CI), a single dose of 33 μg every 7 days (Q7D) for a total of 3 doses (FIG. 29B; median and 90% CI), a single dose of 100 μg (FIG. 29C; median and 90% CI), a single dose of 500 μg (FIG. 29D; median and 90% CI), single dose of 1500 μg (FIG. 29E; median and 90% CI), and a single dose of 167 μg every 3 days (Q3D) for a total of 3 doses (FIG. 29F; median and 90% CI). All treatments were administered intraperitoneal (IP).

[0156] FIG. 30A shows observed (circles) and predicted (monkey PK model; solid lines) serum concentration in cynomolgus monkeys for dose groups over days.

[0157] FIG. 30B shows the goodness of fit for the monkey PK model. The top left scatter plot compares observations of serum concentration against predicted values at the population level. The top right scatter plot compares observations of serum concentration against predicted values at the individual level. In both plots, the dotted line represents unity. The bottom left and right plots show the distribution of weighted residuals for population predictions and time.

[0158] FIGS. 31A-31B show observed (triangles and line fit) and predicted (mouse PD model; solid lines; PRED) tumor volume in hPD-L1-MC38 tumor bearing mice across different treatment groups over days. FIG. 31A shows study #1 treatment groups, where tumor-bearing mice received no treatment (CTRL), 33 μg of the exemplary tested CD80 IgV-Fc (H18Y/A26E/E35D/M47L/V68M/A71G/D90G) every 7 days for a total of 3 doses (Q7Dx3), or a single dose of 100 μg of CD80 IgV-Fc (H18Y/A26E/E35D/M47L/V68M/A71G/D90G). FIG. 31B shows study #2, where tumor-bearing mice received no treatment (CTRL), a single dose of 100 μg of CD80 IgV-Fc (H18Y/A26E/E35D/M47L/V68M/A71G/D90G), 167 μg of CD80 IgV-Fc (H18Y/A26E/E35D/M47L/V68M/A71G/D90G) every 3 days for a total of 3 doses (Q3Dx3), a single dose of 500 μg of CD80 IgV-Fc (H18Y/A26E/E35D/M47L/V68M/A71G/D90G), a or single dose of 1500 μg of the tested CD80 variant.

[0159] FIG. 32A shows predicted target (CD28) saturation in humans administered (intravenous injection (IV)) once weekly (Q1W) a dose of CD80 IgV-Fc (H18Y/A26E/E35D/M47L/V68M/A71G/D90G) at different concentrations.

[0160] FIG. 32B shows predicted human serum concentration levels of the drug under a regimen where the human was administered (IV) once weekly (Q1W) a dose of CD80 IgV-Fc (H18Y/A26E/E35D/M47L/V68M/A71G/D90G) at different concentrations.

[0161] FIG. 32C shows predicted human serum concentration levels of the drug under a regimen where the human was administered (IV) once every three weeks (Q3W) a dose of CD80 IgV-Fc (H18Y/A26E/E35D/M47L/V68M/A71G/D90G) at different concentrations.

[0162] FIG. 33 shows the changes in tumor volume for huPD-L1+MC38 tumor-bearing mice after treatment with a CD80 IgV-Fc variant, oxaliplatin, or both in combination.

[0163] FIG. 34 shows the changes in tumor volume for huPD-L1+MC38 tumor-bearing mice after treatment with a CD80 IgV-Fc variant, an anti-mouse checkpoint antibody against CTLA-4, or both in combination.

[0164] FIG. 35 shows the crystal structure of the binding interface between the CD80 IgV domain of a CD80 IgV-Fc variant and wild-type PD-L1.

[0165] FIG. 36A shows the changes in tumor volume for huPD-L1+MC38 tumor-bearing mice after treatment with a CD80 IgV-Fc variant, an anti-CD28 blocking antibody, or both in combination.

[0166] FIG. 36B shows the changes in tumor volume for huPD-L1+MC38 tumor-bearing mice after treatment with a CD80 IgV-Fc variant, an anti-PD-L1 blocking antibody, or both in combination.

[0167] FIG. 37 shows CD80 IgV-Fc secreted immunomodulatory protein (SIP) concentration levels over time in supernatant collected from SIP-transduced donor Pan T-cells.

[0168] FIG. 38 shows dose-dependent CD28 costimulation induced by exemplary CD80 IgV-Fc SIPs in a Jurkat/IL-2 reporter line.

[0169] FIG. 39 shows CD80 IgV-Fc SIP binding to PD-L1-expressing artificial antigen-presenting cells.

[0170] FIG. 40 depicts dose-dependent FcR-dependent CD28 agonism in a Jurkat/IL-2 reporter line induced by exemplary CD80 ECD-Fc variants.

### DETAILED DESCRIPTION

[0171] Provided herein are immunomodulatory proteins that are or contain variants or mutants of CD80 and specific binding fragments thereof that exhibit altered binding activity or affinity to at least one target ligand cognate binding partner (also called counter-structure ligand protein). In some embodiments, the variant CD80 polypeptides contain one or more amino acid modifications (e.g., amino acid substitutions, deletions, or additions) compared to an unmodified or wild-type CD80 polypeptide. In some embodiments, the variant CD80 polypeptides contain one or more amino acid modifications (e.g., substitutions) compared to an unmodified or wild-type CD80 polypeptide. In some embodiments, the one or more amino acid substitutions are in an IgSF domain (e.g., IgV) of an unmodified or wild-type CD80 polypeptide.

[0172] Also provided herein are immunomodulatory proteins that are fusion proteins that contain variants or mutants of the extracellular domain of CD80 and a multimerization domain. In some aspects, the provided variant CD80 fusion proteins contain a CD80 extracellular domain polypeptide with one or more amino acid modifications (e.g. substitutions) that confer altered binding activity or affinity to at least one target ligand cognate binding partner (also called counter-structure ligand protein). In some embodiments, the variant CD80 polypeptides contain one or more amino acid modifications (e.g., amino acid substitutions, deletions, or additions) compared to the extracellular domain of an unmodified or wild-type CD80 polypeptide. Methods of making and using these variants CD80 are also provided.

[0173] In some embodiments, the altered binding activity, such as binding affinity and/or binding selectivity, e.g., increased or decreased binding affinity or selectivity, is for at least one binding partner protein CD28, PD-L1, or CTLA-4. In some embodiments, the variant CD80 polypeptides exhibit altered, such as increased or decreased, binding activity or affinity to one or more of CD28, PD-L1, or CTLA-4 compared to the unmodified or wild-type CD80 not containing the one or more modifications.

[0174] In some embodiments, the variant CD80 polypeptides exhibit increased binding affinity to one or more of CD28, PD-L1, and CTLA-4 compared to the unmodified or wild-type CD80 not containing the one or more modifications. In some embodiments, the variant CD80 polypeptides exhibit increased binding affinity to CD28 compared to the unmodified or wild-type CD80 not containing the one or more modifications. In some embodiments, the variant CD80 polypeptides exhibit increased binding affinity to PD-L1 compared to the unmodified or wild-type CD80 not containing the one or more modifications. In some embodiments, the variant CD80 polypeptides exhibit increased binding affinity to CTLA-4 compared to the unmodified or wild-type CD80 not containing the one or more modifications.

[0175] In some embodiments, the variant CD80 polypeptides exhibit increased binding affinity to one or both of CD28 and PD-L1 compared to the unmodified or wild-type CD80 not containing the one or more modifications. In some embodiments, the variant CD80 polypeptides exhibit increased binding affinity to one or both of CD28 and CTLA-4 compared to the unmodified or wild-type CD80 not containing the one or more modifications. In some embodiments, the variant CD80 polypeptides exhibit increased binding affinity to one or both of PD-L1 and CTLA-4 compared to the unmodified or wild-type CD80 not containing the one or more modifications. In some embodiments, the variant CD80 polypeptides exhibit increased binding affinity to CD28, PD-L1 and CTLA-4 compared to the unmodified or wild-type CD80 not containing the one or more modifications.

[0176] In some embodiments, the variant CD80 polypeptides provided herein exhibit increased selectivity for binding to CD28, PD-L1 and/or CTLA-4 compared to the selectivity of the unmodified or wild-type CD80 not containing the one more modifications for binding to CD28, PD-L1 and/or CTLA-4. In some embodiments, the ratio is increased greater than or greater than about 1.2-fold, 1.5-fold, 2.0-fold, 3.0-fold, 4.0-fold, 5.0-fold, 6.0-fold, 7.0-fold, 8.0-fold, 9.0-fold, 10.0-fold, 15.0-fold, 20-fold, 30-fold, 40-fold, 50-fold, 100-fold or more.

[0177] In some embodiments, the variant CD80 polypeptides and immunomodulatory proteins modulate an immunological immune response, such as increase an immune response. In some embodiments, the provided variant CD80 polypeptides modulate T cell activation, expansion, differentiation, and survival via interactions with costimulatory signaling molecules. In general, antigen specific T-cell activation generally requires two distinct signals. The first signal is provided by the interaction of the T-cell receptor (TCR) with major histocompatibility complex (MHC) associated antigens present on antigen presenting cells (APCs). The second signal is costimulatory, e.g., a CD28 costimulatory signal, to TCR engagement and necessary to avoid T-cell apoptosis or anergy.

[0178] In some embodiments, under normal physiological conditions, the T cell-mediated immune response is initiated by antigen recognition by the T cell receptor (TCR) and is regulated by a balance of co-stimulatory and inhibitory signals (e.g., immune checkpoint proteins). The immune system relies on immune checkpoints to prevent autoimmunity (i.e., self-tolerance) and to protect tissues from excessive damage during an immune response, for example during an attack against a pathogenic infection. In some cases, however, these immunomodulatory proteins can be dysregulated in diseases and conditions, including tumors, as a mechanism for evading the immune system.

[0179] In some embodiments, among known T-cell costimulatory receptors is CD28, which is the T-cell costimulatory receptor for the ligands B7-1 (CD80) and B7-2 (CD86) both of which are present on APCs. These same ligands can also bind to the inhibitory T-cell receptor CTLA-4 (cytotoxic T-lymphocyte-associated protein 4) with greater affinity than for CD28; the binding to CTLA-4 acts to down-modulate the immune response. In some embodiments, CD80 is able to bind to programmed death ligand 1 (PD-L1). CD80 has similar affinity to PD-L1 as to CD28. PD-L1 is one of two ligands for the inhibitory immune receptor, programmed death 1 (PD-1). The interaction of PD-L1 with PD-1 negatively regulates immune activity by promoting T cell inactivation and down-modulating T cell activity. PD-1 expression on T cells may be induced after T cells have been activated as a strategy to prevent over activity of T cells. Many tumor cells express PD-L1 on their surface, potentially leading to PD-1/PD-L1 interactions and the inhibition of T cell responses against the tumor. The binding of CD80 to PD-L1 can block the interaction between PD-L1 and PD-1, and thereby prevent inhibition of T cell responses, e.g., at the site of a tumor, and effectively potentiate or enhance the immune response. In some embodiments, the provided CD80 polypeptides, e.g., soluble forms of the variant CD80 polypeptides provided herein, can antagonize B7/CTLA-4 binding, preventing CTLA-4 inhibitory signaling, reducing the TCR signaling threshold, thereby promoting T cell activation and immune response

[0180] In some embodiments, CD80 might be available to bind to CD28 receptors, and be involved in inducing T cell responses. In some embodiments, CD80 might be available to bind to PD-L1 to block the interaction between PD-L1 and PD-1 preventing inhibition of T cell responses or CTLA-4 to prevent CTLA-4 inhibitory signaling. Thus, in some cases, interactions of CD80 with PD-L1, CD28, and/or CTLA-4 can yield overlapping and complementary effects. In some embodiments, CD28 and PD-L1 may play complementary roles in modeling an immune response.

[0181] In some embodiments, the provided variant CD80 polypeptides or immunomodulatory proteins modulate (e.g., increase or decrease) immunological activity induced or associated with the inhibitory receptor CTLA-4, the PD-L1/PD-1 negative regulatory complex and/or the costimulatory receptor CD28. For example, in some embodiments, the provided CD80 polypeptides, e.g., soluble forms of the variant CD80 polypeptides provided herein, bind and co-stimulating a CD28 receptor on a localized T cell, thereby promoting an immune response. In some embodiments, the provided CD80 polypeptides, e.g., soluble forms of the variant CD80 polypeptides provided herein, are capable of binding the PD-L1 on a tumor cell or APC, thereby blocking the interaction of PD-L1 and the PD-1 inhibitory receptor, thereby preventing the negative regulatory signaling that would have otherwise resulted from the PD-L1/PD-1 interaction as depicted in in FIG. 1A. In some embodiments, the provided CD80 polypeptides, e.g., soluble forms of the variant CD80 polypeptides provided herein, bind the CTLA-4 inhibitory receptor, blocking its interaction with CD80, expressed on an APC, thereby preventing the negative regulatory signaling of the CD80-bound CTLA-4 receptor as depicted in in FIG. 2A. In some embodiments, the provided CD80 polypeptides, e.g., soluble forms of the variant CD80 polypeptides provided herein, can block the PD-L1/PD-1 interaction while, binding and co-stimulating a CD28 receptor on a localized T cell, thereby promoting an immune response (FIG. 1B). In some particular embodiments, the provided CD80 polypeptides, e.g., soluble forms of the variant CD80 polypeptides provided herein, also bind the CTLA-4 inhibitory receptor, blocking its interaction with CD80 and preventing the negative regulatory signaling of the CD80-bound CTLA-4 receptor.

[0182] Thus, in some embodiments, the provided polypeptides with independent binding affinities to both CD28 and/or PD-L1, and, in some cases, CTLA-4, thereby agonizing or antagonizing the complementary effects of costimulation by receptors. Methods of making and using these variants CD80 are also provided.

[0183] In some embodiments, the variant CD80 polypeptides specifically bind CD28 and/or CTLA-4, such as to human CD28 or human CTLA-4. In some embodiments, the variant CD80 polypeptides exhibit altered, such as increased, binding activity or affinity to one or both of CD28 or CTLA-4 compared to the unmodified or wild-type CD80 not containing the one or more modifications. In some embodiments, the variant CD80 polypeptides exhibit increased binding to CTLA-4, such as to human CTLA-4, compared to a wild-type human CD80 extracellular domain polypeptide. In some embodiments the variant CD80 polypeptides exhibit increased binding to CD28, such as to human CD28, compared to a wild-type human CD80 extracellular domain polypeptide.

[0184] In some embodiments, the variant CD80 IgSF domain fusion proteins are soluble. The ability to format the variant polypeptides in various configurations to, depending on the context, antagonize or agonize an immune response, offers flexibility in therapeutic applications based on the same increased binding and activity of a variant CD80 for binding partners. For example, delivery of enhanced CD80 protein in soluble formats with increased affinity for CD28, PD-L1 and/or CTLA-4 can antagonize signaling of an inhibitory receptor, such as block an inhibitory signal in the cell that may occur to decrease response to an activating stimulus, e.g., CD3 and/or CD28 costimulatory signal or a mitogenic signal. In some cases, the result of this can be to increase the immune response.

[0185] Additionally, certain formats, in some cases, also can mediate CD28 agonism. Among provided embodiments are embodiments that modulate, such as agonize, the costimulatory signal via CD28.

[0186] In some cases, CD28 agonism is mediated by certain variant CD80 polypeptides exhibiting increased binding to PD-L1 to thereby facilitate tethering or crosslinking of the variant CD80 molecule to a surface at the immune synapse for interaction with CD28, thereby facilitating T cell activation by providing a costimulatory signal. This activity, designated herein as PD-L1-dependent CD28 costimulation, is due, in some aspects, to the ability of a variant CD80 polypeptide to bind both PD-L1 and CD80 in a non-competitive manner and/or by provision of a dimeric format of a variant CD80 polypeptide (see e.g. FIG. 1B). In some cases, such PD-L1-dependent costimulation does not require an Fc with effector function and can be mediated by an Fc fusion protein containing an effector-less or inert Fc molecule. In some aspects, tethering or crosslinking also, additionally or alternatively, can be achieved via the Fc receptor when a variant CD80 polypeptide is provided as a fusion protein with a wild-type Fc region of an immunoglobulin that retains or exhibits effector function, designated herein as Fc receptor-dependent CD28 costimulation.

[0187] In some embodiments, it is found herein that certain formats of a variant full extracellular domain of a CD80 polypeptide can mediate CD28 agonism when formatted as a fusion protein with an immunoglobulin Fc that has effector activity. In such examples, binding of the variant CD80 fusion to an FcR via Fc binding may localize or tether the molecule to the immune synapse for engagement with CD28 on a T cell. In some aspects, it is contemplated that such activity is particularly effective in embodiments in which the CD80 polypeptide does not bind to programmed death ligand 1 (PD-L1). It has been reported that CD80 can bind to PD-L1. It is found that certain variants, and variants in certain formats such as formatted with the full extracellular domain of wild-type CD80, exhibit substantially lower PD-L1 binding or do not bind PD-L1. In some embodiments, a molecule that does not bind to PD-L1 exhibits background binding or only slightly above background binding to PD-L1 as detected in a binding assays, e.g. flow cytometry-based assay.

[0188] In some embodiments, the provided variant CD80 polypeptides exhibit increased binding to CD28. In some embodiments, increased binding to CD28 can result in an increase in CD28 costimulatory signaling, thereby promoting T cell activation and immune response. In some aspects, the increase in CD28 costimulatory signaling is dependent on an effector Fc that is able to bind to the FcR. In contrast, CD80 variants that bind PD-L1 can exhibit PD-L1-dependent CD28 agonism in formats that do not require an Fc with effector function, such as those in which the Fc fusion protein is an effector-less or inert Fc molecule.

[0189] In some aspects, crosslinking the Fc receptor, such as via its effector activity, can initiate antibody-dependent cell cytotoxicity (ADCC)-mediated effector functions, and thereby effect depletion of target cells expressing the cognate binding partner, such as CTLA-4-expressing cells (e.g. CTLA-4-expressing T regulatory cells) or PD-L1-expressing cells (e.g. PD-L1^{hi} tumors).

[0190] In some embodiments, the provided CD80 polypeptides, e.g., soluble forms of the variant CD80 polypeptides provided herein, can also antagonize B7/CTLA-4 binding, preventing CTLA-4 inhibitory signaling, reducing the TCR signaling threshold, thereby promoting T cell activation and immune response (FIG. 2B). In some embodiments, the provided CD80 polypeptides, e.g., soluble forms of the variant CD80 polypeptides provided herein, bind the CTLA-4 inhibitory receptor, blocking its interaction with CD80, expressed on an APC, thereby preventing the negative regulatory signaling of the CD80-bound CTLA-4 receptor as depicted in in FIGS. 2A and 2B.

[0191] In some embodiments, the provided variant CD80 polypeptides, such as variant CD80 fusion proteins, modulate, e.g. increase, immunological activity induced or associated with the inhibitory receptor CTLA-4, and/or the costimulatory receptor CD28.

[0192] Enhancement or suppression of the activity of these receptors has clinical significance for treatment of cancer. In some cases, however, therapies to intervene and alter the costimulatory effects of both receptors are constrained by the spatial orientation requirements as well as size limitations imposed by the confines of the immunological synapse. In some aspects, existing therapeutic drugs, including antibody drugs, may not be able to interact simultaneously with the multiple target proteins involved in modulating these interactions. In addition, in some cases, existing therapeutic drugs may only have the ability to antagonize, but not agonize, an immune response. Additionally, pharmacokinetic differences between drugs that independently target one or the other of these two receptors can create difficulties in properly maintaining a desired blood concentration of such drug combinations throughout the course of treatment. The provided variant CD80 polypeptides and immunomodulatory proteins, and other formats as described, address such problems.

[0193] All publications, including patents, patent applications scientific articles and databases, mentioned in this specification are herein incorporated by reference in their entirety for all purposes to the same extent as if each individual publication, including patent, patent application, scientific article or database, were specifically and individually indicated to be incorporated by reference. If a definition set forth herein is contrary to or otherwise inconsistent with a definition set forth in the patents, applications, published applications and other publications that are herein incorporated by reference, the definition set forth herein prevails over the definition that is incorporated herein by reference.

[0194] The section headings used herein are for organizational purposes only and are not to be construed as limiting the subject matter described.

### Definitions

[0195] Unless defined otherwise, all terms of art, notations and other technical and scientific terms or terminology used herein are intended to have the same meaning as is commonly understood by one of ordinary skill in the art to which the claimed subject matter pertains. In some cases, terms with commonly understood meanings are defined herein for clarity and/or for ready reference, and the inclusion of such definitions herein should not necessarily be construed to represent a substantial difference over what is generally understood in the art.

[0196] The terms used throughout this specification are defined as follows unless otherwise limited in specific instances. As used in the specification and the appended claims, the singular forms “a,” “an,” and “the” include plural referents unless the context clearly dictates otherwise. Unless defined otherwise, all technical and scientific terms, acronyms, and abbreviations used herein have the same meaning as commonly understood by one of ordinary skill in the art to which the invention pertains. Unless indicated otherwise, abbreviations and symbols for chemical and biochemical names are per IUPAC-IUB nomenclature. Unless indicated otherwise, all numerical ranges are inclusive of the values defining the range as well as all integer values in-between.

[0197] The term “affinity modified” as used in the context of an immunoglobulin superfamily domain, means a mammalian immunoglobulin superfamily (IgSF) domain having an altered amino acid sequence (relative to the corresponding wild-type parental or unmodified IgSF domain) such that it has an increased or decreased binding affinity or avidity to at least one of its cognate binding partners (alternatively “counter-structures”) compared to the parental wild-type or unmodified (i.e., non-affinity modified) IgSF control domain. Included in this context is an affinity modified CD80 IgSF domain. In some embodiments, the affinity-modified IgSF domain can contain 1, 2, 3, 4, 5, 6, 7, 8, 9, 10, 11, 12, 13, 14, 15, 16, 17, 18, 19, 20, 21, 22, 23, 24, 25, 26, 27, 28, 29, 30 or more amino acid differences, such as amino acid substitutions, in a wildtype or unmodified IgSF domain. An increase or decrease in binding affinity or avidity can be determined using well known binding assays such as flow cytometry. Larsen et al., American Journal of Transplantation, Vol 5: 443-453 (2005). See also, Linsley et al., Immunity, Vol 1(9: 793-801 (1994). An increase in a protein's binding affinity or avidity to its cognate binding partner(s) is to a value at least 10% greater than that of the wild-type IgSF domain control and in some embodiments, at least 20%, 30%, 40%, 50%, 100%, 200%, 300%, 500%, 1000%, 5000%, or 10000% greater than that of the wild-type IgSF domain control value. A decrease in a protein's binding affinity or avidity to at least one of its cognate binding partner is to a value no greater than 90% of the control but no less than 10% of the wild-type IgSF domain control value, and in some embodiments no greater than 80%, 70% 60%, 50%, 40%, 30%, or 20% but no less than 10% of the wild-type IgSF domain control value. An affinity-modified protein is altered in primary amino acid sequence by substitution, addition, or deletion of amino acid residues. The term “affinity modified IgSF domain” is not to be construed as imposing any condition for any particular starting composition or method by which the affinity-modified IgSF domain was created. Thus, the affinity modified IgSF domains of the present invention are not limited to wild type IgSF domains that are then transformed to an affinity modified IgSF domain by any particular process of affinity modification. An affinity modified IgSF domain polypeptide can, for example, be generated starting from wild type mammalian IgSF domain sequence information, then modeled in silico for binding to its cognate binding partner, and finally recombinantly or chemically synthesized to yield the affinity modified IgSF domain composition of matter. In but one alternative example, an affinity modified IgSF domain can be created by site-directed mutagenesis of a wild-type IgSF domain. Thus, affinity modified IgSF domain denotes a product and not necessarily a product produced by any given process. A variety of techniques including recombinant methods, chemical synthesis, or combinations thereof, may be employed.

[0198] The term “antibody” herein is used in the broadest sense and includes polyclonal and monoclonal antibodies, including intact antibodies and functional (antigen-binding) antibody fragments, including fragment antigen binding (Fab) fragments, F(ab′)₂ fragments, Fab′ fragments, Fv fragments, recombinant IgG (rIgG) fragments, single chain antibody fragments, including single chain variable fragments (scFv), and single domain antibodies (e.g., sdAb, sdFv, nanobody) fragments. The term encompasses genetically engineered and/or otherwise modified forms of immunoglobulins, such as intrabodies, peptibodies, chimeric antibodies, fully human antibodies, humanized antibodies, and heteroconjugate antibodies, multispecific, e.g., bispecific, antibodies, diabodies, triabodies, and tetrabodies, tandem di-scFv, tandem tri-scFv. Unless otherwise stated, the term “antibody” should be understood to encompass functional antibody fragments thereof. The term also encompasses intact or full-length antibodies, including antibodies of any class or sub-class, including IgG and sub-classes thereof, IgM, IgE, IgA, and IgD.

[0199] An “antibody fragment” or “antigen-binding fragment” with reference to an antibody refers to a molecule other than an intact antibody that comprises a portion of an intact antibody that binds the antigen to which the intact antibody binds. Examples of antibody fragments include but are not limited to Fv, Fab, Fab′, Fab′-SH, F(ab′)₂; diabodies; linear antibodies; single-chain antibody molecules (e.g. scFv); and multispecific antibodies formed from antibody fragments. Antibody fragments can be made by various techniques, including but not limited to proteolytic digestion of an intact antibody as well as production by recombinant host cells. In some embodiments, the antibodies are recombinantly-produced fragments, such as fragments comprising arrangements that do not occur naturally, such as those with two or more antibody regions or chains joined by synthetic linkers, e.g., peptide linkers, and/or that are may not be produced by enzyme digestion of a naturally-occurring intact antibody.

[0200] The terms “binding affinity,” and “binding avidity” as used herein means the specific binding affinity and specific binding avidity, respectively, of a protein for its counter-structure under specific binding conditions. In biochemical kinetics, avidity refers to the accumulated strength of multiple affinities of individual non-covalent binding interactions, such as between CD80 and its counter-structures PD-L1, CD28, and/or CTLA-4. As such, avidity is distinct from affinity, which describes the strength of a single interaction. An increase or attenuation in binding affinity of a variant CD80 containing an affinity modified CD80 IgSF domain to its counter-structure is determined relative to the binding affinity of the unmodified CD80, such as an unmodified CD80 containing the native or wild-type IgSF domain, such as IgV domain. Methods for determining binding affinity or avidity are known in art. See, for example, Larsen et al., American Journal of Transplantation, Vol. 5: 443453 (2005). In some embodiments, a variant CD80, such as containing an affinity modified IgSF domain, specifically binds to CD28, PD-L1 and/or CTLA-4 measured by flow cytometry with a binding affinity that yields a Mean Fluorescence Intensity (MFI) value at least 10%, 20%, 30%, 40%, 50%, 60%, 70%, 80%, 90%, or 100% greater than an unmodified CD80 control in a binding assay such as described in Example 6.

[0201] The term “biological half-life” refers to the amount of time it takes for a substance, such as an immunomodulatory polypeptide containing a variant CD80 polypeptide of the present invention, to lose half of its pharmacologic or physiologic activity or concentration. Biological half-life can be affected by elimination, excretion, degradation (e.g., enzymatic) of the substance, or absorption and concentration in certain organs or tissues of the body. In some embodiments, biological half-life can be assessed by determining the time it takes for the blood plasma concentration of the substance to reach half its steady state level (“plasma half-life”). Conjugates that can be used to derivatize and increase the biological half-life of polypeptides of the invention are known in the art and include, but are not limited to, polyethylene glycol (PEG), hydroxyethyl starch (HES), XTEN (extended recombinant peptides; see, WO2013130683), human serum albumin (HSA), bovine serum albumin (BSA), lipids (acylation), and poly-Pro-Ala-Ser (PAS), polyglutamic acid (glutamylation).

[0202] The term “blocks binding,” and grammatical variations thereof, with reference to a PD-1 inhibitor, such as an anti-PD-1 antibody, refers to the ability of such inhibitor to inhibit or disrupt or reduce the interaction between PD-1 and a PD-1 ligand, such as PD-L1 or PD-L2. Such inhibition may occur through any mechanism, including direct interference with ligand binding, e.g., because of overlapping binding sites on PD-1, and/or conformational changes in PD-1 induced by the antibody that alter ligand affinity, etc.

[0203] The term “cancer” is used herein to refer to a group of cells that exhibit abnormally high levels of proliferation and growth. A cancer may be benign (also referred to as a benign tumor), pre-malignant, or malignant. Cancer cells may be solid cancer cells or leukemic cancer cells. Examples of cancer include but are not limited to, carcinoma, lymphoma, blastoma, sarcoma, and leukemia. More particular nonlimiting examples of such cancers include squamous cell cancer, small-cell lung cancer, pituitary cancer, esophageal cancer, astrocytoma, soft tissue sarcoma, non-small cell lung cancer (including squamous cell non-small cell lung cancer), adenocarcinoma of the lung, squamous carcinoma of the lung, cancer of the peritoneum, hepatocellular cancer, gastrointestinal cancer, pancreatic cancer, glioblastoma, cervical cancer, ovarian cancer, liver cancer, bladder cancer, hepatoma, breast cancer, colon cancer, colorectal cancer, endometrial or uterine carcinoma, salivary gland carcinoma, kidney cancer, renal cell carcinoma, liver cancer, prostate cancer, vulval cancer, thyroid cancer, hepatic carcinoma, brain cancer, endometrial cancer, testis cancer, cholangiocarcinoma, gallbladder carcinoma, gastric cancer, melanoma, and various types of head and neck cancer (including squamous cell carcinoma of the head and neck).

[0204] The term “chimeric antigen receptor” or “CAR” as used herein refers to an artificial (i.e., man-made) transmembrane protein expressed on a mammalian cell containing at least an ectodomain, a transmembrane, and an endodomain. Optionally, the CAR protein includes a “spacer” which covalently links the ectodomain to the transmembrane domain. A spacer is often a polypeptide linking the ectodomain to the transmembrane domain via peptide bonds. The CAR is typically expressed on a mammalian lymphocyte. In some embodiments, the CAR is expressed on a mammalian cell such as a T-cell or a tumor infiltrating lymphocyte (TIL). A CAR expressed on a T-cell is referred to herein as a “CAR T-cell” or “CAR-T.” In some embodiments the CAR-T is a T helper cell, a cytotoxic T-cell, a natural killer T-cell, a memory T-cell, a regulatory T-cell, or a gamma delta T-cell. When used clinically in, e.g., adoptive cell transfer, a CAR-T with antigen binding specificity to the patient's tumor is typically engineered to express on a native T-cell obtained from the patient. The engineered T-cell expressing the CAR is then infused back into the patient. The CAR-T is thus often an autologous CAR-T although allogeneic CAR-Ts are included within the scope of the invention. The ectodomain of a CAR contains an antigen binding region, such as an antibody or antigen binding fragment thereof (e.g., scFv), that specifically binds under physiological conditions with a target antigen, such as a tumor specific antigen Upon specific binding a biochemical chain of events (i.e., signal transduction) results in modulation of the immunological activity of the CAR-T. Thus, for example, upon specific binding by the antigen binding region of the CAR-T to its target antigen can lead to changes in the immunological activity of the T-cell activity as reflected by changes in cytotoxicity, proliferation or cytokine production. Signal transduction upon CAR-T activation is achieved in some embodiments by the CD3-zeta chain (“CD3-z”) which is involved in signal transduction in native mammalian T-cells. CAR-Ts can further contain multiple signaling domains such as CD28, 41BB or OX40, to further modulate immunomodulatory response of the T-cell. CD3-z contains a conserved motif known as an immunoreceptor tyrosine-based activation motif (ITAM) which is involved in T-cell receptor signal transduction.

[0205] The term “collectively” or “collective” when used in reference to cytokine production induced by the presence of two or more variant CD80 polypeptides in an in vitro assay, means the overall cytokine expression level irrespective of the cytokine production induced by individual variant CD80 polypeptides. In some embodiments, the cytokine being assayed is IFN-gamma in an in vitro primary T-cell assay such as described in Example 7.

[0206] The term “cognate binding partner” (used interchangeably with “counter-structure”) in reference to a polypeptide, such as in reference to an IgSF domain of a variant CD80, refers to at least one molecule (typically a native mammalian protein) to which the referenced polypeptide specifically binds under specific binding conditions. In some aspects, a variant CD80 containing an affinity modified IgSF domain specifically binds to the counter-structure of the corresponding native or wildtype CD80 but with increased or attenuated affinity. A species of ligand recognized and specifically binding to its cognate receptor under specific binding conditions is an example of a counter-structure or cognate binding partner of that receptor. A “cognate cell surface binding partner” is a cognate binding partner expressed on a mammalian cell surface. A “cell surface molecular species” is a cognate binding partner of ligands of the immunological synapse (IS), expressed on and by cells, such as mammalian cells, forming the immunological synapse.

[0207] As used herein, “conjugate,” “conjugation” or grammatical variations thereof refers the joining or linking together of two or more compounds resulting in the formation of another compound, by any joining or linking methods known in the art. It can also refer to a compound which is generated by the joining or linking together two or more compounds. For example, a variant CD80 polypeptide linked directly or indirectly to one or more chemical moieties or polypeptide is an exemplary conjugate. Such conjugates include fusion proteins, those produced by chemical conjugates and those produced by any other methods.

[0208] The term “competitive binding” as used herein means that a protein is capable of specifically binding to at least two cognate binding partners but that specific binding of one cognate binding partner inhibits, such as prevents or precludes, simultaneous binding of the second cognate binding partner. Thus, in some cases, it is not possible for a protein to bind the two cognate binding partners at the same time. Generally, competitive binders contain the same or overlapping binding site for specific binding but this is not a requirement. In some embodiments, competitive binding causes a measurable inhibition (partial or complete) of specific binding of a protein to one of its cognate binding partner due to specific binding of a second cognate binding partner. A variety of methods are known to quantify competitive binding such as ELISA (enzyme linked immunosorbent assay) assays.

[0209] As used herein, a composition refers to any mixture of two or more products, substances, or compounds, including cells. It may be a solution, a suspension, liquid, powder, a paste, aqueous, non-aqueous or any combination thereof.

[0210] The term “conservative amino acid substitution” as used herein means an amino acid substitution in which an amino acid residue is substituted by another amino acid residue having a side chain R group with similar chemical properties (e.g., charge or hydrophobicity). Examples of groups of amino acids that have side chains with similar chemical properties include 1) aliphatic side chains: glycine, alanine, valine, leucine, and isoleucine; 2) aliphatic-hydroxyl side chains: serine and threonine; 3) amide-containing side chains: asparagine and glutamine; 4) aromatic side chains: phenylalanine, tyrosine, and tryptophan; 5) basic side chains: lysine, arginine, and histidine; 6) acidic side chains: aspartic acid and glutamic acid; and 7) sulfur-containing side chains: cysteine and methionine. Conservative amino acids substitution groups are: valine-leucine-isoleucine, phenylalanine-tyrosine, lysine-arginine, alanine-valine, glutamate-aspartate, and asparagine-glutamine.

[0211] The term, “corresponding to” with reference to positions of a protein, such as recitation that nucleotides or amino acid positions “correspond to” nucleotides or amino acid positions in a disclosed sequence, such as set forth in the Sequence Listing, refers to nucleotides or amino acid positions identified upon alignment with the disclosed sequence based on structural sequence alignment or using a standard alignment algorithm, such as the GAP algorithm. For example, corresponding residues can be determined by alignment of a reference sequence with the sequence of wild-type CD80 set forth in SEQ ID NO: 2 (ECD domain) or set forth in SEQ ID NO: 76, 150, or 1245 (IgV domain) by structural alignment methods as described herein. By aligning the sequences, one skilled in the art can identify corresponding residues, for example, using conserved and identical amino acid residues as guides.

[0212] The terms “decrease” or “attenuate” “or suppress” as used herein means to decrease by a statistically significant amount. A decrease can be at least 10%, 20%, 30%, 40%, 50%, 60%, 70%, 80%, 90%, or 100%.

[0213] The terms “derivatives” or “derivatized” refer to modification of a protein by covalently linking it, directly or indirectly, to a composition so as to alter such characteristics as biological half-life, bioavailability, immunogenicity, solubility, toxicity, potency, or efficacy while retaining or enhancing its therapeutic benefit. Derivatives of immunomodulatory polypeptides of the invention are within the scope of the invention and can be made by, for example, glycosylation, PEGylation, lipidation, or Fc-fusion.

[0214] As used herein, detection includes methods that permit visualization (by eye or equipment) of a protein. A protein can be visualized using an antibody specific to the protein. Detection of a protein can also be facilitated by fusion of the protein with a tag including a label that is detectable or by contact with a second reagent specific to the protein, such as a secondary antibody, that includes a label that is detectable.

[0215] As used herein, domain (typically a sequence of three or more, generally 5 or 7 or more amino acids, such as 10 to 200 amino acid residues) refers to a portion of a molecule, such as a protein or encoding nucleic acid, that is structurally and/or functionally distinct from other portions of the molecule and is identifiable. For example, domains include those portions of a polypeptide chain that can form an independently folded structure within a protein made up of one or more structural motifs and/or that is recognized by virtue of a functional activity, such as binding activity. A protein can have one, or more than one, distinct domains. For example, a domain can be identified, defined or distinguished by homology of the primary sequence or structure to related family members, such as homology to motifs. In another example, a domain can be distinguished by its function, such as an ability to interact with a biomolecule, such as a cognate binding partner. A domain independently can exhibit a biological function or activity such that the domain independently or fused to another molecule can perform an activity, such as, for example binding. A domain can be a linear sequence of amino acids or a non-linear sequence of amino acids. Many polypeptides contain a plurality of domains. Such domains are known, and can be identified by those of skill in the art. For exemplification herein, definitions are provided, but it is understood that it is well within the skill in the art to recognize particular domains by name. If needed appropriate software can be employed to identify domains.

[0216] The term “ectodomain” as used herein refers to the region of a membrane protein, such as a transmembrane protein, that lies outside the vesicular membrane. Ectodomains often contain binding domains that specifically bind to ligands or cell surface receptors, such as via a binding domain that specifically binds to the ligand or cell surface receptor. The ectodomain of a cellular transmembrane protein is alternately referred to as an extracellular domain.

[0217] The terms “effective amount” or “therapeutically effective amount” refer to a quantity and/or concentration of a therapeutic composition of the invention, including a protein composition or cell composition, that when administered ex vivo (by contact with a cell from a patient) or in vivo (by administration into a patient) either alone (i.e., as a monotherapy) or in combination with additional therapeutic agents, yields a statistically significant decrease in disease progression as, for example, by ameliorating or eliminating symptoms and/or the cause of the disease. An effective amount may be an amount that relieves, lessens, or alleviates at least one symptom or biological response or effect associated with a disease or disorder, prevents progression of the disease or disorder, or improves physical functioning of the patient. In some embodiments the patient is a mammal such as a non-human primate or human patient.

[0218] The term “endodomain” as used herein refers to the region found in some membrane proteins, such as transmembrane proteins, that extend into the interior space defined by the cell surface membrane. In mammalian cells, the endodomain is the cytoplasmic region of the membrane protein. In cells, the endodomain interacts with intracellular constituents and can be play a role in signal transduction and thus, in some cases, can be an intracellular signaling domain. The endodomain of a cellular transmembrane protein is alternately referred to as a cytoplasmic domain, which, in some cases, can be a cytoplasmic signaling domain.

[0219] The terms “enhanced” or “increased” as used herein in the context of increasing immunological activity of a mammalian lymphocyte means to increase one or more activities the lymphocyte. An increased activity can be one or more of increase cell survival, cell proliferation, cytokine production, or T-cell cytotoxicity, such as by a statistically significant amount. In some embodiments, reference to increased immunological activity means to increase interferon gamma (IFN-gamma) production, such as by a statistically significant amount. In some embodiments, the immunological activity can be assessed in a mixed lymphocyte reaction (MLR) assay. Methods of conducting MLR assays are known in the art. Wang et al., Cancer Immunol Res. 2014 September: 2(9):846-56. Other methods of assessing activities of lymphocytes are known in the art, including any assay as described herein. In some embodiments an enhancement can be an increase of at least 10%, 20%, 30%, 40%, 50%, 75%, 100%, 200%, 300%, 400%, or 500% greater than a non-zero control value.

[0220] The term “engineered cell” as used herein refers to a mammalian cell that has been genetically modified by human intervention such as by recombinant DNA methods or viral transduction. In some embodiments, the cell is an immune cell, such as a lymphocyte (e.g., T cell, B cell, NK cell) or an antigen presenting cell (e.g., dendritic cell). The cell can be a primary cell from a patient or can be a cell line. In some embodiments, an engineered cell of the invention contains a variant CD80 of the invention engineered to modulate immunological activity of a T-cell expressing CD28, PD-L1 and/or CTLA-4, or an APC expressing PD-L1, to which the variant CD80 polypeptide specifically binds.

[0221] The term “engineered T-cell” as used herein refers to a T-cell such as a T helper cell, cytotoxic T-cell (alternatively, cytotoxic T lymphocyte or CTL), natural killer T-cell, regulatory T-cell, memory T-cell, or gamma delta T-cell, that has been genetically modified by human intervention such as by recombinant DNA methods or viral transduction methods.

[0222] The term “engineered T-cell receptor” or “engineered TCR” refers to a T-cell receptor (TCR) engineered to specifically bind with a desired affinity to a major histocompatibility complex (MHC)/peptide target antigen that is selected, cloned, and/or subsequently introduced into a population of T-cells, often used for adoptive immunotherapy. In contrast to engineered TCRs, CARs are engineered to bind target antigens in a MHC independent manner.

[0223] The term “expressed on” as used herein is used in reference to a protein expressed on the surface of a cell, such as a mammalian cell. Thus, the protein is expressed as a membrane protein. In some embodiments, the expressed protein is a transmembrane protein. In some embodiments, the protein is conjugated to a small molecule moiety such as a drug or detectable label. Proteins expressed on the surface of a cell can include cell-surface proteins such as cell surface receptors that are expressed on mammalian cells.

[0224] The term “half-life extending moiety” refers to a moiety of a polypeptide fusion or chemical conjugate that extends the half-life of a protein circulating in mammalian blood serum compared to the half-life of the protein that is not so conjugated to the moiety. In some embodiments, half-life is extended by greater than or greater than about 1.2-fold, 1.5-fold, 2.0-fold, 3.0-fold, 4.0-fold, 5.0-fold, or 6.0-fold. In some embodiments, half-life is extended by more than 6 hours, more than 12 hours, more than 24 hours, more than 48 hours, more than 72 hours, more than 96 hours or more than 1 week after in vivo administration compared to the protein without the half-life extending moiety. The half-life refers to the amount of time it takes for the protein to lose half of its concentration, amount, or activity. Half-life can be determined for example, by using an ELISA assay or an activity assay. Exemplary half-life extending moieties include an Fc domain, a multimerization domain, polyethylene glycol (PEG), hydroxyethyl starch (HES), XTEN (extended recombinant peptides; see, WO2013130683), human serum albumin (HSA), bovine serum albumin (BSA), lipids (acylation), and poly-Pro-Ala-Ser (PAS), and polyglutamic acid (glutamylation).

[0225] The term “immunological synapse” or “immune synapse” as used herein means the interface between a mammalian cell that expresses MHC I (major histocompatibility complex) or MHC II, such as an antigen-presenting cell or tumor cell, and a mammalian lymphocyte such as an effector T cell or Natural Killer (NK) cell.

[0226] An Fc (fragment crystallizable) region or domain of an immunoglobulin molecule (also termed an Fc polypeptide) corresponds largely to the constant region of the immunoglobulin heavy chain, and is responsible for various functions, including the antibody's effector function(s). The Fc domain contains part or all of a hinge domain of an immunoglobulin molecule plus a CH2 and a CH3 domain. The Fc domain can form a dimer of two polypeptide chains joined by one or more disulfide bonds. Exemplary dimerized polypeptides are depicted in FIG. 3. In some embodiments, the Fc is a variant Fc that exhibits reduced (e.g., reduced greater than 30%, 40%, 50%, 60%, 70%, 80%, 90% or more) activity to facilitate an effector function. In some embodiments, reference to amino acid substitutions in an Fc region is by EU numbering system unless described with reference to a specific SEQ ID NO. EU numbering is known and is according to the most recently updated IMGT Scientific Chart (IMGT®, the international ImMunoGeneTics information System®, http://www.imgt.org/IMGTScientificChart/Numbering/Hu_IGHGnber.html (created: 17 May 2001, last updated: 10 Jan. 2013) and the EU index as reported in Kabat, E. A. et al. Sequences of Proteins of Immunological interest. 5th ed. US Department of Health and Human Services, NIH publication No. 91-3242 (1991).

[0227] An immunoglobulin Fc fusion (“Fc-fusion”), such as an immunomodulatory Fc fusion protein, is a molecule comprising one or more polypeptides (or one or more small molecules) operably linked to an Fc region of an immunoglobulin. An Fc-fusion may comprise, for example, the Fc region of an antibody (which facilitates pharmacokinetics) and a variant CD80 polypeptide. An immunoglobulin Fc region may be linked indirectly or directly to one or more variant CD80 polypeptides or small molecules (fusion partners). Various linkers are known in the art and can optionally be used to link an Fc to a fusion partner to generate an Fc-fusion. Fc-fusions of identical species can be dimerized to form Fc-fusion homodimers, or using non-identical species to form Fc-fusion heterodimers. In some embodiments, the Fc is a mammalian Fc such as a murine, rabbit or human Fc.

[0228] The term “host cell” refers to a cell that can be used to express a protein encoded by a recombinant expression vector. A host cell can be a prokaryote, for example, E. coli, or it can be a eukaryote, for example, a single-celled eukaryote (e.g., a yeast or other fungus), a plant cell (e.g., a tobacco or tomato plant cell), an animal cell (e.g., a human cell, a monkey cell, a hamster cell, a rat cell, a mouse cell, or an insect cell) or a hybridoma. Examples of host cells include Chinese hamster ovary (CHO) cells or their derivatives such as Veggie CHO, DG44, Expi CHO, or CHOZN and related cell lines which grow in serum-free media or CHO strain DX-B11, which is deficient in DHFR. In some embodiments, a host cell can be a mammalian cell (e.g., a human cell, a monkey cell, a hamster cell, a rat cell, a mouse cell, or an insect cell).

[0229] The term “immunoglobulin” (abbreviated “Ig”) as used herein refers to a mammalian immunoglobulin protein including any of the five human classes of antibody: IgA (which includes subclasses IgA1 and IgA2), IgD, IgE, IgG (which includes subclasses IgG1, IgG2, IgG3, and IgG4), and IgM. The term is also inclusive of immunoglobulins that are less than full-length, whether wholly or partially synthetic (e.g., recombinant or chemical synthesis) or naturally produced, such as antigen binding fragment (Fab), variable fragment (Fv) containing V_{H} and V_{L}, the single chain variable fragment (scFv) containing V_{H} and V_{L} linked together in one chain, as well as other antibody V region fragments, such as Fab′, F(ab)₂, F(ab′)₂, dsFv diabody, Fc, and Fd polypeptide fragments. Bispecific antibodies, homobispecific and heterobispecific, are included within the meaning of the term.

[0230] The term “immunoglobulin superfamily” or “IgSF” as used herein means the group of cell surface and soluble proteins that are involved in the recognition, binding, or adhesion processes of cells. Molecules are categorized as members of this superfamily based on shared structural features with immunoglobulins (i.e., antibodies); they all possess a domain known as an immunoglobulin domain or fold. Members of the IgSF include cell surface antigen receptors, co-receptors and co-stimulatory molecules of the immune system, molecules involved in antigen presentation to lymphocytes, cell adhesion molecules, certain cytokine receptors and intracellular muscle proteins. They are commonly associated with roles in the immune system. Proteins in the immunological synapse are often members of the IgSF. IgSF can also be classified into “subfamilies” based on shared properties such as function. Such subfamilies typically consist of from 4 to 30 IgSF members.

[0231] The terms “IgSF domain” or “immunoglobulin domain” or “Ig domain” as used herein refers to a structural domain of IgSF proteins. Ig domains are named after the immunoglobulin molecules. They contain about 70-110 amino acids and are categorized according to their size and function. Ig-domains possess a characteristic Ig-fold, which has a sandwich-like structure formed by two sheets of antiparallel beta strands. Interactions between hydrophobic amino acids on the inner side of the sandwich and highly conserved disulfide bonds formed between cysteine residues in the B and F strands stabilize the Ig-fold. One end of the Ig domain has a section called the complementarity determining region that is important for the specificity of antibodies for their ligands. The Ig like domains can be classified (into classes) as: IgV, IgC1, IgC2, or IgI. Most Ig domains are either variable (IgV) or constant (IgC). IgV domains with 9 beta strands are generally longer than IgC domains with 7 beta strands. Ig domains of some members of the IgSF resemble IgV domains in the amino acid sequence, yet are similar in size to IgC domains. These are called IgC2 domains, while standard IgC domains are called IgC1 domains. T-cell receptor (TCR) chains contain two Ig domains in the extracellular portion; one IgV domain at the N-terminus and one IgC1 domain adjacent to the cell membrane. CD80 contains two Ig domains: IgV and IgC.

[0232] The term “IgSF species” as used herein means an ensemble of IgSF member proteins with identical or substantially identical primary amino acid sequence. Each mammalian immunoglobulin superfamily (IgSF) member defines a unique identity of all IgSF species that belong to that IgSF member. Thus, each IgSF family member is unique from other IgSF family members and, accordingly, each species of a particular IgSF family member is unique from the species of another IgSF family member. Nevertheless, variation between molecules that are of the same IgSF species may occur owing to differences in post-translational modification such as glycosylation, phosphorylation, ubiquitination, nitrosylation, methylation, acetylation, and lipidation. Additionally, minor sequence differences within a single IgSF species owing to gene polymorphisms constitute another form of variation within a single IgSF species as do wild type truncated forms of IgSF species owing to, for example, proteolytic cleavage. A “cell surface IgSF species” is an IgSF species expressed on the surface of a cell, generally a mammalian cell.

[0233] The term “immunological activity” as used herein in the context of mammalian lymphocytes such as T-cells refers to one or more cell survival, cell proliferation, cytokine production (e.g., interferon-gamma), or T-cell cytotoxicity activities. In some cases, an immunological activity can means their expression of cytokines, such as chemokines or interleukins. Assays for determining enhancement or suppression of immunological activity include the MLR (mixed lymphocyte reaction) assays measuring interferon-gamma cytokine levels in culture supernatants (Wang et al., Cancer Immunol Res. 2014 September: 2(9):846-56), SEB (staphylococcal enterotoxin B) T cell stimulation assay (Wang et al., Cancer Immunol Res. 2014 September: 2(9):846-56), and anti-CD3 T cell stimulation assays (Li and Kurlander, J Transl Med. 2010: 8: 104). Since T cell activation is associated with secretion of IFN-gamma cytokine, detecting IFN-gamma levels in culture supernatants from these in vitro human T cell assays can be assayed using commercial ELISA kits (Wu et al, Immunol Lett 2008 Apr. 15; 117(1): 57-62). Induction of an immune response results in an increase in immunological activity relative to quiescent lymphocytes. An immunomodulatory protein, such as a variant CD80 polypeptide containing an affinity modified IgSF domain, as provided herein can in some embodiments increase or, in alternative embodiments, decrease IFN-gamma (interferon-gamma) expression in a primary T-cell assay relative to a wild-type IgSF member or IgSF domain control. Those of skill will recognize that the format of the primary T-cell assay used to determine an increase in IFN-gamma expression will differ from that employed to assay for a decrease in IFN-gamma expression. In assaying for the ability of an immunomodulatory protein or affinity modified IgSF domain of the invention to decrease IFN-gamma expression in a primary T-cell assay, a Mixed Lymphocyte Reaction (MLR) assay can be used as described in Example 6. Conveniently, a soluble form of an affinity modified IgSF domain of the invention can be employed to determine its ability to antagonize and thereby decrease the IFN-gamma expression in a MLR as likewise described in Example 6. Alternatively, in assaying for the ability of an immunomodulatory protein or affinity modified IgSF domain of the invention to increase IFN-gamma expression in a primary T-cell assay, a co-immobilization assay can be used. In a co-immobilization assay, a T-cell receptor signal, provided in some embodiments by anti-CD3 antibody, is used in conjunction with a co-immobilized affinity modified IgSF domain, such as a variant CD80, to determine the ability to increase IFN-gamma expression relative to a wild-type IgSF domain control. Methods to assay the immunological activity of engineered cells, including to evaluate the activity of a variant CD80 transmembrane immunomodulatory protein, are known in the art and include, but are not limited to, the ability to expand T cells following antigen stimulation, sustain T cell expansion in the absence of re-stimulation, and anti-cancer activities in appropriate animal models. Assays also include assays to assess cytotoxicity, including a standard ⁵¹Cr-release assay (see e.g., Milone et al., (2009) Molecular Therapy 17: 1453-1464) or flow based cytotoxicity assays, or an impedance based cytotoxicity assay (Peper et al. (2014) Journal of Immunological Methods, 405:192-198).

[0234] An “immunomodulatory polypeptide” or “immunomodulatory protein” is a polypeptide or protein molecule that modulates immunological activity. By “modulation” or “modulating” an immune response is meant that immunological activity is either increased or decreased. An immunomodulatory protein can be a single polypeptide chain or a multimer (dimers or higher order multimers) of at least two polypeptide chains covalently bonded to each other by, for example, interchain disulfide bonds. Thus, monomeric, dimeric, and higher order multimeric polypeptides are within the scope of the defined term. Multimeric polypeptides can be homomultimeric (of identical polypeptide chains) or heteromultimeric (of non-identical polypeptide chains). An immunomodulatory protein can comprise a variant CD80 polypeptide.

[0235] The term “increase” as used herein means to increase by a statistically significant amount. An increase can be at least 5%, 10%, 20%, 30%, 40%, 50%, 75%, 100%, or greater than a non-zero control value.

[0236] An “isoform” of CD80 is one of a plurality of naturally occurring CD80 polypeptides that differ in amino acid sequence. Isoforms can be the product of splice variants of an RNA transcript expressed by a single gene, or the expression product of highly similar but different genes yielding a functionally similar protein such as may occur from gene duplication. As used herein, the term “isoform” of CD80 also refers to the product of different alleles of a CD80 gene.

[0237] As used herein, a “kit” refers to a combination of components, such as a combination of the compositions herein and another item for a purpose including, but not limited to, reconstitution, activation, and instruments/devices for delivery, administration, diagnosis, and assessment of a biological activity or property. Kits optionally include instructions for use.

[0238] The term “label” refers to a compound or composition which can be attached or linked, directly or indirectly to provide a detectable signal or that can interact with a second label to modify a detectable signal. The label can be conjugated directly or indirectly to a polypeptide so as to generate a labeled polypeptide. The label can be detectable by itself (e.g., radioisotope labels or fluorescent labels) or, in the case of an enzymatic label, can catalyze chemical alteration of a substrate compound composition which is detectable. Non-limiting examples of labels included fluorogenic moieties, green fluorescent protein, or luciferase.

[0239] The term “lymphocyte” as used herein means any of three subtypes of white blood cell in a mammalian immune system. They include natural killer cells (NK cells) (which function in cell-mediated, cytotoxic innate immunity), T cells (for cell-mediated, cytotoxic adaptive immunity), and B cells (for humoral, antibody-driven adaptive immunity). T cells include: T helper cells, cytotoxic T-cells, natural killer T-cells, memory T-cells, regulatory T-cells, or gamma delta T-cells. Innate lymphoid cells (ILC) are also included within the definition of lymphocyte.

[0240] The term “subject,” in some cases used interchangeably with patient or individual, is a mammal, such as a human or other animal, and typically is human. The terms “mammal” includes reference to at least one of a: human, chimpanzee, rhesus monkey, cynomolgus monkey, dog, cat, mouse, or rat.

[0241] The terms “mammal,” or “patient” specifically includes reference to at least one of a: human, chimpanzee, rhesus monkey, cynomolgus monkey, dog, cat, mouse, or rat.

[0242] The term “membrane protein” as used herein means a protein that, under physiological conditions, is attached directly or indirectly to a lipid bilayer. A lipid bilayer that forms a membrane can be a biological membrane such as a eukaryotic (e.g., mammalian) cell membrane or an artificial (i.e., man-made) membrane such as that found on a liposome. Attachment of a membrane protein to the lipid bilayer can be by way of covalent attachment, or by way of non-covalent interactions such as hydrophobic or electrostatic interactions. A membrane protein can be an integral membrane protein or a peripheral membrane protein. Membrane proteins that are peripheral membrane proteins are non-covalently attached to the lipid bilayer or non-covalently attached to an integral membrane protein. A peripheral membrane protein forms a temporary attachment to the lipid bilayer such that under the range of conditions that are physiological in a mammal, peripheral membrane protein can associate and/or disassociate from the lipid bilayer. In contrast to peripheral membrane proteins, integral membrane proteins form a substantially permanent attachment to the membrane's lipid bilayer such that under the range of conditions that are physiological in a mammal, integral membrane proteins do not disassociate from their attachment to the lipid bilayer. A membrane protein can form an attachment to the membrane by way of one layer of the lipid bilayer (monotopic), or attached by way of both layers of the membrane (polytopic). An integral membrane protein that interacts with only one lipid bilayer is an “integral monotopic protein”. An integral membrane protein that interacts with both lipid bilayers is an “integral polytopic protein” alternatively referred to herein as a “transmembrane protein”.

[0243] The terms “modulating” or “modulate” as used herein in the context of an immune response, such as a mammalian immune response, refer to any alteration, such as an increase or a decrease, of existing or potential immune responses that occurs as a result of administration of an immunomodulatory polypeptide comprising a variant CD80 of the present invention. Thus, it refers to an alteration, such as an increase or decrease, of an immune response as compared to the immune response that occurs or is present in the absence of the administration of the immunomodulatory protein comprising the variant CD80. Such modulation includes any induction, activation, suppression or alteration in degree or extent of immunological activity of an immune cell. Immune cells include B cells, T cells, NK (natural killer) cells, NK T cells, professional antigen-presenting cells (APCs), and non-professional antigen-presenting cells, and inflammatory cells (neutrophils, macrophages, monocytes, eosinophils, and basophils). Modulation includes any change imparted on an existing immune response, a developing immune response, a potential immune response, or the capacity to induce, regulate, influence, or respond to an immune response. Modulation includes any alteration in the expression and/or function of genes, proteins and/or other molecules in immune cells as part of an immune response. Modulation of an immune response or modulation of immunological activity includes, for example, the following: elimination, deletion, or sequestration of immune cells; induction or generation of immune cells that can modulate the functional capacity of other cells such as autoreactive lymphocytes, antigen presenting cells, or inflammatory cells; induction of an unresponsive state in immune cells (i.e., anergy); enhancing or suppressing the activity or function of immune cells, including but not limited to altering the pattern of proteins expressed by these cells. Examples include altered production and/or secretion of certain classes of molecules such as cytokines, chemokines, growth factors, transcription factors, kinases, costimulatory molecules, or other cell surface receptors or any combination of these modulatory events. Modulation can be assessed, for example, by an alteration in IFN-gamma (interferon gamma) expression relative to the wild-type or unmodified CD80 control in a primary T cell assay (see, Zhao and Ji, Exp Cell Res. 2016 Jan. 1; 340(1): 132-138). Modulation can be assessed, for example, by an alteration of an immunological activity of engineered cells, such as an alteration in in cytotoxic activity of engineered cells or an alteration in cytokine secretion of engineered cells relative to cells engineered with a wild-type CD80 transmembrane protein.

[0244] The term, a “multimerization domain” refers to a sequence of amino acids that promotes stable interaction of a polypeptide molecule with one or more additional polypeptide molecules, each containing a complementary multimerization domain (e.g., a first multimerization domain and a second multimerization domain), which can be the same or a different multimerization domain. The interactions between complementary multimerization domains, e.g., interaction between a first multimerization domain and a second multimerization domain, form a stable protein-protein interaction to produce a multimer of the polypeptide molecule with the additional polypeptide molecule. In some cases, the multimerization domain is the same and interacts with itself to form a stable protein-protein interaction between two polypeptide chains. Generally, a polypeptide is joined directly or indirectly to the multimerization domain. Exemplary multimerization domains include the immunoglobulin sequences or portions thereof, leucine zippers, hydrophobic regions, hydrophilic regions, and compatible protein-protein interaction domains. The multimerization domain, for example, can be an immunoglobulin constant region or domain, such as, for example, the Fc domain or portions thereof from IgG, including IgG1, IgG2, IgG3 or IgG4 subtypes, IgA, IgE, IgD and IgM and modified forms thereof.

[0245] The terms “nucleic acid” and “polynucleotide” are used interchangeably to refer to a polymer of nucleic acid residues (e.g., deoxyribonucleotides or ribonucleotides) in either single- or double-stranded form. Unless specifically limited, the terms encompass nucleic acids containing known analogues of natural nucleotides and that have similar binding properties to it and are metabolized in a manner similar to naturally-occurring nucleotides. Unless otherwise indicated, a particular nucleic acid sequence also implicitly encompasses conservatively modified variants thereof (e.g., degenerate codon substitutions) and complementary nucleotide sequences as well as the sequence explicitly indicated (a “reference sequence”). Specifically, degenerate codon substitutions may be achieved by generating sequences in which the third position of one or more selected (or all) codons is substituted with mixed-base and/or deoxyinosine residues. The term nucleic acid or polynucleotide encompasses cDNA or mRNA encoded by a gene.

[0246] The term “molecular species” as used herein means an ensemble of proteins with identical or substantially identical primary amino acid sequence. Each mammalian immunoglobulin superfamily (IgSF) member defines a collection of identical or substantially identical molecular species. Thus, for example, human CD80 is an IgSF member and each human CD80 molecule is a molecular species of CD80. Variation between molecules that are of the same molecular species may occur owing to differences in post-translational modification such as glycosylation, phosphorylation, ubiquitination, nitrosylation, methylation, acetylation, and lipidation. Additionally, minor sequence differences within a single molecular species owing to gene polymorphisms constitute another form of variation within a single molecular species as do wild type truncated forms of a single molecular species owing to, for example, proteolytic cleavage. A “cell surface molecular species” is a molecular species expressed on the surface of a mammalian cell. Two or more different species of protein, each of which is present exclusively on one or exclusively the other (but not both) of the two mammalian cells forming the IS, are said to be in “cis” or “cis configuration” with each other. Two different species of protein, the first of which is exclusively present on one of the two mammalian cells forming the IS and the second of which is present exclusively on the second of the two mammalian cells forming the IS, are said to be in “trans” or “trans configuration.” Two different species of protein each of which is present on both of the two mammalian cells forming the IS are in both cis and trans configurations on these cells.

[0247] The term “non-competitive binding” as used herein means the ability of a protein to specifically bind simultaneously to at least two cognate binding partners. Thus, the protein is able to bind to at least two different cognate binding partners at the same time, although the binding interaction need not be for the same duration such that, in some cases, the protein is specifically bound to only one of the cognate binding partners. In some embodiments, the binding occurs under specific binding conditions. In some embodiments, the simultaneous binding is such that binding of one cognate binding partner does not substantially inhibit simultaneous binding to a second cognate binding partner. In some embodiments, non-competitive binding means that binding a second cognate binding partner to its binding site on the protein does not displace the binding of a first cognate binding partner to its binding site on the protein. Methods of assessing non-competitive binding are well known in the art such as the method described in Perez de La Lastra et al., Immunology, 1999 April: 96(4): 663-670. In some cases, in non-competitive interactions, the first cognate binding partner specifically binds at an interaction site that does not overlap with the interaction site of the second cognate binding partner such that binding of the second cognate binding partner does not directly interfere with the binding of the first cognate binding partner. Thus, any effect on binding of the cognate binding partner by the binding of the second cognate binding partner is through a mechanism other than direct interference with the binding of the first cognate binding partner. For example, in the context of enzyme-substrate interactions, a non-competitive inhibitor binds to a site other than the active site of the enzyme. Non-competitive binding encompasses uncompetitive binding interactions in which a second cognate binding partner specifically binds at an interaction site that does not overlap with the binding of the first cognate binding partner but binds to the second interaction site only when the first interaction site is occupied by the first cognate binding partner.

[0248] The term “package insert” is used to refer to instructions customarily included in commercial packages of therapeutic products, that contain information about the indications, usage, dosage, administration, combination therapy, contraindications and/or warnings concerning the use of such therapeutic products.

[0249] The term “pharmaceutical composition” refers to a composition suitable for pharmaceutical use in a mammalian subject, often a human. A pharmaceutical composition typically comprises an effective amount of an active agent (e.g., an immunomodulatory polypeptide comprising a variant CD80 or engineered cells expressing a variant CD80 transmembrane immunomodulatory protein) and a carrier, excipient, or diluent. The carrier, excipient, or diluent is typically a pharmaceutically acceptable carrier, excipient or diluent, respectively.

[0250] The terms “polypeptide” and “protein” are used interchangeably herein and refer to a molecular chain of two or more amino acids linked through peptide bonds. The terms do not refer to a specific length of the product. Thus, “peptides,” and “oligopeptides,” are included within the definition of polypeptide. The terms include post-translational modifications of the polypeptide, for example, glycosylation, acetylation, phosphorylation and the like. The terms also include molecules in which one or more amino acid analogs or non-canonical or unnatural amino acids that can be synthesized, or expressed recombinantly using known protein engineering techniques. In addition, proteins can be derivatized.

[0251] The term “primary T-cell assay” as used herein refers to an in vitro assay to measure interferon-gamma (“IFN-gamma”) expression. A variety of such primary T-cell assays are known in the art such as that described in Example 6. In a preferred embodiment, the assay used is anti-CD3 coimmobilization assay. In this assay, primary T cells are stimulated by anti-CD3 immobilized with or without additional recombinant proteins. Culture supernatants are harvested at timepoints, usually 24-72 hours. In another embodiment, the assay used is a mixed lymphocyte reaction (MLR). In this assay, primary T cells are simulated with allogenic APC. Culture supernatants are harvested at timepoints, usually 24-72 hours. Human IFN-gamma levels are measured in culture supernatants by standard ELISA techniques. Commercial kits are available from vendors and the assay is performed according to manufacturer's recommendation.

[0252] The term “purified” as applied to nucleic acids, such as encoding immunomodulatory proteins of the invention, generally denotes a nucleic acid or polypeptide that is substantially free from other components as determined by analytical techniques well known in the art (e.g., a purified polypeptide or polynucleotide forms a discrete band in an electrophoretic gel, chromatographic eluate, and/or a media subjected to density gradient centrifugation). For example, a nucleic acid or polypeptide that gives rise to essentially one band in an electrophoretic gel is “purified.” A purified nucleic acid or protein of the invention is at least about 50% pure, usually at least about 75%, 80%, 85%, 90%, 95%, 96%, 99% or more pure (e.g., percent by weight or on a molar basis).

[0253] The term “recombinant” indicates that the material (e.g., a nucleic acid or a polypeptide) has been artificially (i.e., non-naturally) altered by human intervention. The alteration can be performed on the material within, or removed from, its natural environment or state. For example, a “recombinant nucleic acid” is one that is made by recombining nucleic acids, e.g., during cloning, affinity modification, DNA shuffling or other well-known molecular biological procedures. A “recombinant DNA molecule,” is comprised of segments of DNA joined together by means of such molecular biological techniques. The term “recombinant protein” or “recombinant polypeptide” as used herein refers to a protein molecule which is expressed using a recombinant DNA molecule. A “recombinant host cell” is a cell that contains and/or expresses a recombinant nucleic acid or that is otherwise altered by genetic engineering, such as by introducing into the cell a nucleic acid molecule encoding a recombinant protein, such as a transmembrane immunomodulatory protein provided herein. Transcriptional control signals in eukaryotes comprise “promoter” and “enhancer” elements. Promoters and enhancers consist of short arrays of DNA sequences that interact specifically with cellular proteins involved in transcription. Promoter and enhancer elements have been isolated from a variety of eukaryotic sources including genes in yeast, insect and mammalian cells and viruses (analogous control elements, i.e., promoters, are also found in prokaryotes). The selection of a particular promoter and enhancer depends on what cell type is to be used to express the protein of interest. The terms “in operable combination,” “in operable order” and “operably linked” as used herein refer to the linkage of nucleic acid sequences in such a manner or orientation that a nucleic acid molecule capable of directing the transcription of a given gene and/or the synthesis of a desired protein molecule is produced.

[0254] The term “recombinant expression vector” as used herein refers to a DNA molecule containing a desired coding sequence and appropriate nucleic acid sequences necessary for the expression of the operably linked coding sequence in a particular host cell. Nucleic acid sequences necessary for expression in prokaryotes include a promoter, optionally an operator sequence, a ribosome binding site and possibly other sequences. Eukaryotic cells are known to utilize promoters, enhancers, and termination and polyadenylation signals. A secretory signal peptide sequence can also, optionally, be encoded by the recombinant expression vector, operably linked to the coding sequence for the recombinant protein, such as a recombinant fusion protein, so that the expressed fusion protein can be secreted by the recombinant host cell, for easier isolation of the fusion protein from the cell, if desired. The term includes the vector as a self-replicating nucleic acid structure as well as the vector incorporated into the genome of a host cell into which it has been introduced. Among the vectors are viral vectors, such as lentiviral vectors.

[0255] The term “selectivity” refers to the preference of a subject protein, or polypeptide, for specific binding of one substrate, such as one cognate binding partner, compared to specific binding for another substrate, such as a different cognate binding partner of the subject protein. Selectivity can be reflected as a ratio of the binding activity (e.g., binding affinity) of a subject protein and a first substrate, such as a first cognate binding partner, (e.g., K_{d1}) and the binding activity (e.g., binding affinity) of the same subject protein with a second cognate binding partner (e.g., K_{d2}).

[0256] The term “sequence identity” as used herein refers to the sequence identity between genes or proteins at the nucleotide or amino acid level, respectively. “Sequence identity” is a measure of identity between proteins at the amino acid level and a measure of identity between nucleic acids at nucleotide level. The protein sequence identity may be determined by comparing the amino acid sequence in a given position in each sequence when the sequences are aligned. Similarly, the nucleic acid sequence identity may be determined by comparing the nucleotide sequence in a given position in each sequence when the sequences are aligned. Methods for the alignment of sequences for comparison are well known in the art, such methods include GAP, BESTFIT, BLAST, FASTA and TFASTA. The BLAST algorithm calculates percent sequence identity and performs a statistical analysis of the similarity between the two sequences. The software for performing BLAST analysis is publicly available through the National Center for Biotechnology Information (NCBI) website.

[0257] The term “soluble” as used herein in reference to proteins, means that the protein is not a membrane protein. In general, a soluble protein contains only the extracellular domain of an IgSF family member receptor, or a portion thereof containing an IgSF domain or domains or specific-binding fragments thereof, but does not contain the transmembrane domain. In some cases, solubility of a protein can be improved by linkage or attachment, directly or indirectly via a linker, to an Fc domain, which, in some cases, also can improve the stability and/or half-life of the protein. In some aspects, a soluble protein is an Fc fusion protein.

[0258] The term “species” as used herein with respect to polypeptides or nucleic acids means an ensemble of molecules with identical or substantially identical sequences. Variation between polypeptides that are of the same species may occur owing to differences in post-translational modification such as glycosylation, phosphorylation, ubiquitination, nitrosylation, methylation, acetylation, and lipidation. Slightly truncated sequences of polypeptides that differ (or encode a difference) from the full length species at the amino-terminus or carboxyl-terminus by no more than 1, 2, or 3 amino acid residues are considered to be of a single species. Such microheterogeneities are a common feature of manufactured proteins.

[0259] The term “specific binding fragment” as used herein in reference to a full-length wild-type mammalian CD80 polypeptide or an IgV or an IgC domain thereof, means a polypeptide having a subsequence of an IgV and/or IgC domain and that specifically binds in vitro and/or in vivo to a mammalian CD28, mammalian PD-L1 and/or mammalian CTLA-4, such as a human or murine CD28, PD-L1, and/or CTLA-4. In some embodiments, the specific binding fragment of the CD80 IgV or the CD80 IgC is at least 60%, 70%, 75%, 80%, 85%, 90%, 95%, 96%, 97%, 98%, or 99% the sequence length of the full-length wild-type sequence. The specific binding fragment can be altered in sequence to form the variant CD80.

[0260] The term “specifically binds” as used herein means the ability of a protein, under specific binding conditions, to bind to a target protein such that its affinity or avidity is at least 5 times as great, but optionally at least 10, 20, 30, 40, 50, 100, 250 or 500 times as great, or even at least 1000 times as great as the average affinity or avidity of the same protein to a collection of random peptides or polypeptides of sufficient statistical size. A specifically binding protein need not bind exclusively to a single target molecule but may specifically bind to a non-target molecule due to similarity in structural conformation between the target and non-target (e.g., paralogs or orthologs). Those of skill will recognize that specific binding to a molecule having the same function in a different species of animal (i.e., ortholog) or to a non-target molecule having a substantially similar epitope as the target molecule (e.g., paralog) is possible and does not detract from the specificity of binding which is determined relative to a statistically valid collection of unique non-targets (e.g., random polypeptides). Thus, a polypeptide of the invention may specifically bind to more than one distinct species of target molecule due to cross-reactivity. Solid-phase ELISA immunoassays or surface plasmon resonance (e.g., Biacore) measurements can be used to determine specific binding between two proteins. Generally, interactions between two binding proteins have dissociation constants (K_{d}) less than 1×10⁻⁵ M, and often as low as 1×10⁻¹² M. In certain embodiments of the present disclosure, interactions between two binding proteins have dissociation constants of 1×10⁻⁶ M, 1×10⁻⁷ M, 1×10⁻⁸ M, 1×10⁻⁹ M, 1×10⁻¹⁰ M or 1×10⁻¹¹ M.

[0261] The terms “surface expresses” or “surface expression” in reference to a mammalian cell expressing a polypeptide means that the polypeptide is expressed as a membrane protein. In some embodiments, the membrane protein is a transmembrane protein.

[0262] As used herein, “synthetic,” with reference to, for example, a synthetic nucleic acid molecule or a synthetic gene or a synthetic peptide refers to a nucleic acid molecule or polypeptide molecule that is produced by recombinant methods and/or by chemical synthesis methods.

[0263] The term “targeting moiety” as used herein refers to a composition that is covalently or non-covalently attached to, or physically encapsulates, a polypeptide comprising the variant CD80. The targeting moiety has specific binding affinity for a desired counter-structure such as a cell surface receptor (e.g., the B7 family member PD-L1), or a tumor antigen such as tumor specific antigen (TSA) or a tumor associated antigen (TAA) such as B7-H6. Typically, the desired counter-structure is localized on a specific tissue or cell-type. Targeting moieties include: antibodies, antigen binding fragment (Fab), variable fragment (Fv) containing V_{H} and V_{L}, the single chain variable fragment (scFv) containing V_{H} and V_{L} linked together in one chain, as well as other antibody V region fragments, such as Fab′, F(ab)₂, F(ab′)₂, dsFv diabody, nanobodies, soluble receptors, receptor ligands, affinity matured receptors or ligands, as well as small molecule (<500 Dalton) compositions (e.g., specific binding receptor compositions). Targeting moieties can also be attached covalently or non-covalently to the lipid membrane of liposomes that encapsulate a polypeptide of the present invention.

[0264] The term “transmembrane protein” as used herein means a membrane protein that substantially or completely spans a lipid bilayer such as those lipid bilayers found in a biological membrane such as a mammalian cell, or in an artificial construct such as a liposome. The transmembrane protein comprises a transmembrane domain (“transmembrane domain”) by which it is integrated into the lipid bilayer and by which the integration is thermodynamically stable under physiological conditions. Transmembrane domains are generally predictable from their amino acid sequence via any number of commercially available bioinformatics software applications on the basis of their elevated hydrophobicity relative to regions of the protein that interact with aqueous environments (e.g., cytosol, extracellular fluid). A transmembrane domain is often a hydrophobic alpha helix that spans the membrane. A transmembrane protein can pass through the both layers of the lipid bilayer once or multiple times. A transmembrane protein includes the provided transmembrane immunomodulatory proteins described herein. In addition to the transmembrane domain, a transmembrane immunomodulatory protein of the invention further comprises an ectodomain and, in some embodiments, an endodomain.

[0265] The terms “treating,” “treatment,” or “therapy” of a disease or disorder as used herein mean slowing, stopping or reversing the disease or disorders progression, as evidenced by decreasing, cessation or elimination of either clinical or diagnostic symptoms, by administration of a therapeutic composition (e.g., containing an immunomodulatory protein) of the invention either alone or in combination with another compound as described herein. As used herein in the context of cancer, the terms “treatment” or, “inhibit,” “inhibiting” or “inhibition” of cancer refers to at least one of: a statistically significant decrease in the rate of tumor growth, a cessation of tumor growth, or a reduction in the size, mass, metabolic activity, or volume of the tumor, as measured by standard criteria such as, but not limited to, the Response Evaluation Criteria for Solid Tumors (RECIST), or a statistically significant increase in progression free survival (PFS) or overall survival (OS). “Preventing,” “prophylaxis,” or “prevention” of a disease or disorder as used in the context of this invention refers to the administration of an immunomodulatory polypeptide, either alone or in combination with another compound, to prevent the occurrence or onset of a disease or disorder or some or all of the symptoms of a disease or disorder or to lessen the likelihood of the onset of a disease or disorder.

[0266] The term “tumor specific antigen” or “TSA” as used herein refers to a counter-structure that is present primarily on tumor cells of a mammalian subject but generally not found on normal cells of the mammalian subject. A tumor specific antigen need not be exclusive to tumor cells but the percentage of cells of a particular mammal that have the tumor specific antigen is sufficiently high or the levels of the tumor specific antigen on the surface of the tumor are sufficiently high such that it can be targeted by anti-tumor therapeutics, such as immunomodulatory polypeptides of the invention, and provide prevention or treatment of the mammal from the effects of the tumor. In some embodiments, in a random statistical sample of cells from a mammal with a tumor, at least 50% of the cells displaying a TSA are cancerous. In other embodiments, at least 60%, 70%, 80%, 85%, 90%, 95%, or 99% of the cells displaying a TSA are cancerous.

[0267] The term “variant” (also “modified” or mutant”) as used in reference to a variant CD80 means a CD80, such as a mammalian (e.g., human or murine) CD80 created by human intervention. The variant CD80 is a polypeptide having an altered amino acid sequence, relative to an unmodified or wild-type CD80. The variant CD80 is a polypeptide which differs from a wild-type CD80 isoform sequence by one or more amino acid substitutions, deletions, additions, or combinations thereof. For purposes herein, the variant CD80 contains at least one affinity modified domain, whereby one or more of the amino acid differences occurs in an IgSF domain (e.g., IgV domain). A variant CD80 can contain 1, 2, 3, 4, 5, 6, 7, 8, 9, 10, 11, 12, 13, 14, 15, 16, 17, 18, 19, 20, 21, 22, 23, 24, 25, 26, 27, 28, 29, 30 or more amino acid differences, such as amino acid substitutions. A variant CD80 polypeptide generally exhibits at least 50%, 60%, 70%, 80%, 85%, 86%, 87%, 88%, 89%, 90%, 91%, 92%, 93%, 94%, 95%, 96%, 97%, 98%, 99% or more sequence identity to a corresponding wild-type or unmodified CD80, such as to the sequence of SEQ ID NO:1, a mature sequence thereof or a portion thereof containing the extracellular domain or an IgSF domain thereof. In some embodiments, a variant CD80 polypeptide exhibits at least 50%, 60%, 70%, 80%, 85%, 86%, 87%, 88%, 89%, 90%, 91%, 92%, 93%, 94%, 95%, 96%, 97%, 98%, 99% or more sequence identity to a corresponding wild-type or unmodified CD80 comprising the sequence set forth in SEQ ID NO: 2, SEQ ID NO: 76, or SEQ ID NO: 150, or SEQ ID NO: 1245.

[0268] Non-naturally occurring amino acids as well as naturally occurring amino acids are included within the scope of permissible substitutions or additions. A variant CD80 is not limited to any particular method of making and includes, for example, de novo chemical synthesis, de novo recombinant DNA techniques, or combinations thereof. A variant CD80 of the invention specifically binds to at least one or more of: CD28, PD-L1 and/or CTLA-4 of a mammalian species. In some embodiments, the altered amino acid sequence results in an altered (i.e., increased or decreased) binding affinity or avidity to CD28, PD-L1 and/or CTLA-4 compared to the unmodified or wild-type CD80 protein. An increase or decrease in binding affinity or avidity can be determined using well known binding assays such as flow cytometry. Larsen et al., American Journal of Transplantation, Vol 5: 443-453 (2005). See also, Linsley et al., Immunity, Vol 1(9): 793-801 (1994). An increase in variant CD80 binding affinity or avidity to CD28, PD-L1 and/or CTLA-4 can be a value at least 5% greater than that of the unmodified or wild-type CD80 and in some embodiments, at least 10%, 15%, 20%, 30%, 40%, 50%, 100% greater than that of the unmodified or wild-type CD80 control value. A decrease in CD80 binding affinity or avidity to CD28, PD-L1 and/or CTLA-4 is to a value no greater than 95% of the of the unmodified or wild-type CD80 control values, and in some embodiments no greater than 80%, 70% 60%, 50%, 40%, 30%, 20%, 10%, 5%, or no detectable binding affinity or avidity of the unmodified or wild-type CD80 control values. A variant CD80 polypeptide is altered in primary amino acid sequence by substitution, addition, or deletion of amino acid residues. The term “variant” in the context of variant CD80 polypeptide is not to be construed as imposing any condition for any particular starting composition or method by which the variant CD80 is created. A variant CD80 can, for example, be generated starting from wild type mammalian CD80 sequence information, then modeled in silico for binding to CD28, PD-L1 and/or CTLA-4, and finally recombinantly or chemically synthesized to yield the variant CD80. In but one alternative example, the variant CD80 can be created by site-directed mutagenesis of an unmodified or wild-type CD80. Thus, variant CD80 denotes a composition and not necessarily a product produced by any given process. A variety of techniques including recombinant methods, chemical synthesis, or combinations thereof, may be employed.

[0269] The term “wild-type” or “natural” or “native” as used herein is used in connection with biological materials such as nucleic acid molecules, proteins (e.g., CD80), IgSF members, host cells, and the like, refers to those which are found in nature and not modified by human intervention.

[0270] As used herein, the singular forms “a,” “an,” and “the” include plural referents unless the context clearly dictates otherwise. For example, “a” or “an” means “at least one” or “one or more.” It is understood that aspects and variations described herein include “consisting” and/or “consisting essentially of” aspects and variations.

[0271] Throughout this disclosure, various aspects of the claimed subject matter are presented in a range format. It should be understood that the description in range format is merely for convenience and brevity and should not be construed as an inflexible limitation on the scope of the claimed subject matter. Accordingly, the description of a range should be considered to have specifically disclosed all the possible sub-ranges as well as individual numerical values within that range. For example, where a range of values is provided, it is understood that each intervening value, between the upper and lower limit of that range and any other stated or intervening value in that stated range is encompassed within the claimed subject matter. The upper and lower limits of these smaller ranges may independently be included in the smaller ranges, and are also encompassed within the claimed subject matter, subject to any specifically excluded limit in the stated range. Where the stated range includes one or both of the limits, ranges excluding either or both of those included limits are also included in the claimed subject matter. This applies regardless of the breadth of the range.

[0272] The term “about” as used herein refers to the usual error range for the respective value readily known to the skilled person in this technical field. Reference to “about” a value or parameter herein includes (and describes) embodiments that are directed to that value or parameter per se. For example, description referring to “about X” includes description of “X”.

[0273] As used herein, “optional” or “optionally” means that the subsequently described event or circumstance does or does not occur, and that the description includes instances where said event or circumstance occurs and instances where it does not. For example, an optionally substituted group means that the group is unsubstituted or is substituted.

[0274] As used herein, the abbreviations for any protective groups, amino acids and other compounds, are, unless indicated otherwise, in accord with their common usage, recognized abbreviations, or the IUPAC-IUB Commission on Biochemical Nomenclature (see, (1972) Biochem. 11: 1726).

### I. VARIANT CD80 IGSF DOMAIN FUSION PROTEINS

[0275] Provided herein are fusion proteins containing variant CD80 polypeptides that exhibit altered (increased or decreased) binding activity or affinity for one or more CD80 binding partners. In some embodiments, the CD80 binding partner is CD28, PD-L1, or CTLA-4. In some embodiments, the variant CD80 polypeptides exhibit altered (e.g. increased) binding activity or affinity for one or more CD80 binding partners. In some embodiments, the variant CD80 polypeptides exhibit altered (e.g. increased) binding activity or affinity for two or more CD80 binding partners. In some embodiments, the two or more CD80 binding partner is two or more of CD28, PD-L1, or CTLA-4. In some embodiments, the variant CD80 polypeptides exhibit altered (e.g. increased) binding activity or affinity for three CD80 binding partners. In some embodiments, the CD80 binding partner is CD28, PD-L1, andCTLA-4. In some embodiments, the variant CD80 polypeptide contains one or more amino acid modifications, such as one or more substitutions (alternatively, “mutations” or “replacements”), deletions or additions in an immunoglobulin superfamily (IgSF) domain (IgD) relative to a wild-type or unmodified CD80 polypeptide or a portion of a wild-type or unmodified CD80 containing the IgD or a specific binding fragment thereof. Thus, a provided variant CD80 polypeptide is or comprises a variant IgD (hereinafter called “vIgD”) in which the one or more amino acid modifications (e.g., substitutions) is in an IgD. In some embodiments, the variant CD80 is soluble and lacks a transmembrane domain.

[0276] In some embodiments, the variant CD80 polypeptides contain an extracellular domain containing an IgD that includes an IgV domain and an IgC domain. In some embodiments, the IgD can include the entire extracellular domain (ECD). In some embodiments, the IgD comprises an IgV domain or an IgC (e.g., IgC2) domain or specific binding fragment of the IgV domain or the IgC (e.g., IgC2) domain, or combinations thereof. In some embodiments, the IgD can be an IgV only, the combination of the IgV and IgC, including the entire extracellular domain (ECD), or any combination of Ig domains of CD80. Table 1 provides exemplary residues that correspond to IgV or IgC regions of CD80. In some embodiments, the variant CD80 polypeptide contains an IgV domain, or an IgC domain, or specific binding fragments thereof in which the at least one amino acid modification (e.g., substitution) is in the IgV domain or IgC domain or the specific binding fragment thereof. In some embodiments, the variant CD80 polypeptide contains an IgV domain or specific binding fragments thereof in which the at least one of the amino acid modifications (e.g., substitutions) is in the IgV domain or a specific binding fragment thereof. In some embodiments, by virtue of the altered binding activity or affinity, the altered IgV domain or IgC domain is an affinity modified IgSF domain.

TABLE 1
CD80 Domains and Sequences

| | NCBI | | | | | | |
|---|---|---|---|---|---|---|---|
| | Protein | | | | | | |
| | Accession | | | | | | |
| | Number/ | | | Cognate Cell | Amino Acid Sequence (SEQ ID NO) | | |
| IgSF | UniProtKB | IgSF Region | | Surface | Precursor | | |
| Member | Protein | & Domain | Other | Binding | (mature | | |
| (Synonym) | Identifier | Class | Domains | Partners | residues) | Mature | ECD |
| CD80 | NP_005182.1 | 35-135, 35- | S: 1-34, | CD28, | 1 | 1536 | 2 |
| (B7-1) | P33681 | 138, 37-138, | E: 35-242, | CTLA4, PD- | (35-288) | | |
| | | or 35-141 | T: 243- | L1 | | | |
| | | IgV, | 263, C: | | | | |
| | | 145-230, 154- | 264-288 | | | | |
| | | 232, or 142- | | | | | |
| | | 232 IgC | | | | | |

[0277] In some embodiments, the variant is modified in one more IgSF domains relative to the sequence of an unmodified CD80 sequence. In some embodiments, the unmodified CD80 sequence is a wild-type CD80. In some embodiments, the unmodified or wild-type CD80 has the sequence of a native CD80 or an ortholog thereof. In some embodiments, the unmodified CD80 is or comprises the extracellular domain (ECD) of CD80 or a portion thereof containing one or more IgSF domain (see Table 1). For example, an unmodified CD80 polypeptide is or comprises an IgV domain set forth as amino acids 35-135 of SEQ ID NO:1, amino acids 35-138 of SEQ ID NO: 1 (see SEQ ID NO: 1245), or amino acids 35-141 of SEQ ID NO: 1. In some cases, an unmodified CD80 polypeptide is or comprises an IgC domain set forth as amino acids 145-230 of SEQ ID NO:1 or amino acids 142-232 of SEQ ID NO:1. In some embodiments, the extracellular domain of an unmodified or wild-type CD80 polypeptide comprises an IgV domain and an IgC domain or domains. However, the variant CD80 polypeptide need not comprise both the IgV domain and the IgC domain or domains. In some embodiments, the variant CD80 polypeptide comprises or consists essentially of the IgV domain or a specific binding fragment thereof. In some embodiments, the variant CD80 polypeptide comprises or consists essentially of the IgC domain or specific binding fragments thereof. In some embodiments, the variant CD80 is soluble and lacks a transmembrane domain. In some embodiments, the variant CD80 further comprises a transmembrane domain and, in some cases, also a cytoplasmic domain.

[0278] In some embodiments, the wild-type or unmodified CD80 polypeptide is a mammalian CD80 polypeptide, such as, but not limited to, a human, a mouse, a cynomolgus monkey, or a rat CD80 polypeptide. In some embodiments, the wild-type or unmodified CD80 sequence is human.

[0279] In some embodiments, the wild-type or unmodified CD80 polypeptide has (i) the sequence of amino acids set forth in SEQ ID NO: 1 or a mature form thereof lacking the signal sequence, (ii) a sequence of amino acids that exhibits at least about 85%, 86%, 87%, 88%, 89%, 90%, 91%, 92%, 93%, 94%, 95%, 96%, 97%, 98%, 99% sequence identity to SEQ ID NO: 1 or a mature form thereof, or (iii) is a portion of (i) or (ii) containing an IgV domain or IgC domain or specific binding fragments thereof.

[0280] In some embodiments, the wild-type or unmodified CD80 polypeptide is or comprises an extracellular domain of the CD80 or a portion thereof. For example, in some embodiments, the unmodified or wild-type CD80 polypeptide comprises the amino acid sequence set forth in SEQ ID NO: 2, or an ortholog thereof. For example, the unmodified or wild-type CD80 polypeptide can comprise (i) the sequence of amino acids set forth in SEQ ID NO:2, (ii) a sequence of amino acids that has at least about 85%, 86%, 87%, 88%, 89%, 90%, 91%, 92%, 93%, 94%, 95%, 96%, 97%, 98%, 99% sequence identity to SEQ ID NO: 2, or (iii) is a specific binding fragment of (i) or (ii) comprising an IgV domain or an IgC domain. In some embodiments, the wild-type or unmodified extracellular domain of CD80 is capable of binding one or more CD80 binding proteins, such as one or more of CTLA-4, PD-L1 or CD28.

[0281] In some embodiments, the wild-type or unmodified CD80 polypeptide contains an IgV domain or an IgC domain, or a specific binding fragment thereof. In some embodiments, the IgV domain of the wild-type or unmodified CD80 polypeptide comprises the amino acid sequence set forth in SEQ ID NO: 76, 150, or 1245, or an ortholog thereof. For example, the IgV domain of the unmodified or wild-type CD80 polypeptide can contain (i) the sequence of amino acids set forth in SEQ ID NO: 76, 150, or 1245, (ii) a sequence of amino acids that has at least about 85%, 86%, 87%, 88%, 89%, 90%, 91%, 92%, 93%, 94%, 95%, 96%, 97%, 98%, 99% sequence identity to SEQ ID NO: 76, 150, or 1245, or (iii) is a specific binding fragment of (i) or (ii). In some embodiments, the wild-type or unmodified IgV domain is capable of binding one or more CD80 binding proteins, such as one or more of CTLA-4, PD-L1 or CD28.

[0282] In some embodiments, the IgC domain of the wild-type or unmodified CD80 polypeptide comprises the amino acid sequence set forth as residues 145-230, 154-232, or 142-232 of SEQ ID NO: 1, or an ortholog thereof. For example, the IgC domain of the unmodified or wild-type CD80 polypeptide can contain (i) the sequence of amino acids set forth as residues 145-230, 154-232, or 142-232 of SEQ ID NO: 1, (ii) a sequence of amino acids that has at least about 85%, 86%, 87%, 88%, 89%, 90%, 91%, 92%, 93%, 94%, 95%, 96%, 97%, 98%, 99% sequence identity to residues 145-230, 154-232, or 142-232 of SEQ ID NO: 1, or (iii) is a specific binding fragment of (i) or (ii). In some embodiments, the wild-type or unmodified IgC domain is capable of binding one or more CD80 binding proteins.

[0283] In some embodiments, the wild-type or unmodified CD80 polypeptide contains a specific binding fragment of CD80, such as a specific binding fragment of the IgV domain or the IgC domain. In some embodiments, the specific binding fragment can bind CD28, PD-L1 and/or CTLA-4. The specific binding fragment can have an amino acid length of at least 50 amino acids, such as at least 60, 70, 80, 90, 100, or 110 amino acids. In some embodiments, the specific binding fragment of the IgV domain contains an amino acid sequence that is at least about 85%, 86%, 87%, 88%, 89%, 90%, 91%, 92%, 93%, 94%, 95%, 96%, 97%, 98%, 99% of the length of the IgV domain set forth as amino acids 35-135, 35-138, 37-138 or 35-141 of SEQ ID NO: 1. In some embodiments, the specific binding fragment of the IgC domain comprises an amino acid sequence that is at least about 85%, 86%, 87%, 88%, 89%, 90%, 91%, 92%, 93%, 94%, 95%, 96%, 97%, 98%, 99% of the length of the IgC domain set forth as amino acids 145-230, 154-232, 142-232 of SEQ ID NO: 1.

[0284] In some embodiments, the variant CD80 IgSF domain fusion protein contains a variant CD80 polypeptide that comprises the ECD domain or a portion thereof comprising one or more affinity modified IgSF domains. In some embodiments, the variant CD80 polypeptides can comprise an IgV domain or an IgC domain, or a specific binding fragment of the IgV domain or a specific binding fragment of the IgC domain in which at least one of the IgV or IgC domain contains the one or more amino acid modifications (e.g., substitutions). In some embodiments, the variant CD80 polypeptides can comprise an IgV domain and an IgC domain, or a specific binding fragment of the IgV domain and a specific binding fragment of the IgC domain. In some embodiments, the variant CD80 polypeptide comprises a full-length IgV domain. In some embodiments, the variant CD80 polypeptide comprises a full-length IgC domain. In some embodiments, the variant CD80 polypeptide comprises a specific binding fragment of the IgV domain. In some embodiments, the variant CD80 polypeptide comprises a specific binding fragment of the IgC domain. In some embodiments, the variant CD80 polypeptide comprises a full-length IgV domain and a full-length IgC domain. In some embodiments, the variant CD80 polypeptide comprises a full-length IgV domain and a specific binding fragment of an IgC domain. In some embodiments, the variant CD80 polypeptide comprises a specific binding fragment of an IgV domain and a full-length IgC domain. In some embodiments, the variant CD80 polypeptide comprises a specific binding fragment of an IgV domain and a specific binding fragment of an IgC domain.

[0285] In any of such embodiments, the one or more amino acid modifications (e.g., substitutions) of the variant CD80 polypeptides can be located in any one or more of the CD80 polypeptide domains. For example, in some embodiments, one or more amino acid modifications (e.g., substitutions) are located in the extracellular domain of the variant CD80 polypeptide. In some embodiments, one or more amino acid modifications (e.g., substitutions) are located in the IgV domain or specific binding fragment of the IgV domain. In some embodiments, one or more amino acid modifications (e.g., substitutions) are located in the IgC domain or specific binding fragment of the IgC domain.

[0286] Generally, each of the various attributes of polypeptides are separately disclosed (e.g., affinity of CD80 for binding partners, number of variations per polypeptide chain, number of linked polypeptide chains, the number and nature of amino acid alterations per variant CD80, etc.). However, as will be clear to the skilled artisan, any particular polypeptide can comprise a combination of these independent attributes. It is understood that reference to amino acids, including to a specific sequence set forth as a SEQ ID NO used to describe domain organization of an IgSF domain are for illustrative purposes and are not meant to limit the scope of the embodiments provided. It is understood that polypeptides and the description of domains thereof are theoretically derived based on homology analysis and alignments with similar molecules. Thus, the exact locus can vary, and is not necessarily the same for each protein. Hence, the specific IgSF domain, such as specific IgV domain or IgC domain, can be several amino acids (such as one, two, three or four) longer or shorter.

[0287] Further, various embodiments of the invention as discussed below are frequently provided within the meaning of a defined term as disclosed above. The embodiments described in a particular definition are therefore to be interpreted as being incorporated by reference when the defined term is utilized in discussing the various aspects and attributes described herein. Thus, the headings, the order of presentation of the various aspects and embodiments, and the separate disclosure of each independent attribute is not meant to be a limitation to the scope of the present disclosure.

[0288] A. Variant CD80 Polypeptides

[0289] Provided herein are variant CD80 IgSF domain fusion proteins that contain at least one affinity-modified IgSF domain or a specific binding fragment thereof relative to an IgSF domain contained in a wild-type or unmodified CD80 polypeptide such that the variant CD80 polypeptide exhibits altered (increased or decreased) binding activity or affinity for one or more cognate binding partners, CD28, PD-L1, or CTLA-4, compared to a wild-type or unmodified CD80 polypeptide. In some embodiments, a variant CD80 polypeptide has a binding affinity for CD28, PD-L1, or CTLA-4 that differs from that of a wild-type or unmodified CD80 polypeptide control sequence as determined by, for example, solid-phase ELISA immunoassays, flow cytometry or surface plasmon resonance (Biacore) assays. In some embodiments, the variant CD80 polypeptide has an increased binding affinity for CD28, PD-L1, and/or CTLA-4. In some embodiments, the variant CD80 polypeptide has an increased binding affinity for CD28 and/or CTLA-4. In some embodiments, the variant CD80 polypeptide has an decreased binding affinity for PD-L1. The CD28, PD-L1 and/or the CTLA-4 can be a mammalian protein, such as a human protein or a murine protein.

[0290] The altered, e.g. increased, binding activity or affinity for CD28, PD-L1 and/or the CTLA-4 is conferred by one or more amino acid modifications in an IgSF domain of a wild-type or unmodified IgSF domain. The wild-type or unmodified CD80 sequence does not necessarily have to be used as a starting composition to generate variant CD80 polypeptides described herein. Therefore, use of the term “substitution” does not imply that the provided embodiments are limited to a particular method of making variant CD80 polypeptides. Variants CD80 polypeptides can be made, for example, by de novo peptide synthesis and thus does not necessarily require a “substitution” in the sense of altering a codon to encode for the substitution. This principle also extends to the terms “addition” and “deletion” of an amino acid residue which likewise do not imply a particular method of making. The means by which the variant CD80 polypeptides are designed or created is not limited to any particular method. In some embodiments, however, a wild-type or unmodified CD80 encoding nucleic acid is mutagenized from wild-type or unmodified CD80 genetic material and screened for desired specific binding affinity and/or induction of IFN-gamma expression or other functional activity according to the methods disclosed in the Examples or other methods known to a skilled artisan. In some embodiments, a variant CD80 polypeptide is synthesized de novo utilizing protein or nucleic acid sequences available at any number of publicly available databases and then subsequently screened. The National Center for Biotechnology Information provides such information and its website is publicly accessible via the internet as is the UniProtKB database as discussed previously.

[0291] Unless stated otherwise, as indicated throughout the present disclosure, the amino acid modifications(s) are designated by amino acid position number corresponding to the numbering of positions of the unmodified ECD sequence set forth in SEQ ID NO:2 or, where applicable, the unmodified IgV sequence set forth in SEQ ID NO: 76, 150, or 1245 as follows:

(SEQ ID NO: 2)
VIHVTKEVKEVATLSCGHNVSVEELAQTRIYWQKEKKMVL
TMMSGDMNIWPEYKNRTIEDITNNLSIVILALRPSDEGTY
ECVVLKYEKDAFKREHLAEVTLSVKADFPTPSISDFEIPT
SNIRRIICSTSGGFPEPHLSWLENGEELNAINTTVSQDPE
TELYAVSSKLDFNMTTNHSFMCLIKYGHLRVNQTFNWNTT
KQEHFPDN
(SEQ ID NO: 76)
VIHVTKEVKEVATLSCGHNVSVEELAQTRIYWQKEKKMVL
TMMSGDMNIWPEYKNRTIFDITNNLSIVILALRPSDEGTY
ECVVLKYEKDAFKREHLAEVT
(SEQ ID NO: 150)
VIHVTKEVKEVATLSCGHNVSVEELAQTRIYWQKEKKMVL
TMMSGDMNIWPEYKNRTIFDITNNLSIVILALRPSDEGTY
ECVVLKYEKDAFKREHLAEVTLSVKAD
(SEQ ID NO: 1245)
VIHVTKEVKEVATLSCGHNVSVEELAQTR1YWQKEKKMVL
TMMSGDMNIWPEYKNRTIFDITNNLSIVILALRPSDEGTY
ECVVLKYEKDAFKREHLAEVTLSV

[0292] It is within the level of a skilled artisan to identify the corresponding position of a modification, e.g., amino acid substitution, in a CD80 polypeptide, including portion thereof containing an IgSF domain (e.g., IgV) thereof, such as by alignment of a reference sequence with SEQ ID NO:2 or SEQ ID NO:76 or SEQ ID NO:150 or SEQ ID NO: 1245. In the listing of modifications throughout this disclosure, the amino acid position is indicated in the middle, with the corresponding unmodified (e.g., wild-type) amino acid listed before the number and the identified variant amino acid substitution listed after the number. If the modification is a deletion of the position, a “del” is indicated, and if the modification is an insertion at the position, an “ins” is indicated. In some cases, an insertion is listed with the amino acid position indicated in the middle, with the corresponding unmodified (e.g., wild-type) amino acid listed before and after the number and the identified variant amino acid insertion listed after the unmodified (e.g., wild-type) amino acid.

[0293] In particular embodiments provided herein, the amino acid modifications (e.g. substitutions) are in the full extracellular domain of a wild-type CD80. In some embodiments, the variant CD80 polypeptide contains amino acid residues corresponding to amino acid residues 35-230 of the exemplary wild-type human CD80 extracellular domain set forth in SEQ ID NO:1. In some embodiments, the variant CD80 polypeptides contains one or more amino acid substitutions in an extracellular domain corresponding to amino acid residues 35-230 of the exemplary wild-type human CD80 extracellular domain set forth in SEQ ID NO:1. In some embodiments, the extracellular domain of wild-type CD80 is set forth in SEQ ID NO:2. In some embodiments, the variant CD80 polypeptide containing the one or more amino acid substitutions in the extracellular domain has a sequence of amino acids that has at least or at least about 85%, 86%, 87%, 88%, 89%, 90%, 91%, 92%, 93%, 94%, 95%, 96%, 97%, 98%, 99% or more sequence identity to the sequence set forth in SEQ ID NO:2.

[0294] In some embodiments, the variant CD80 polypeptide has one or more amino acid modifications (e.g., substitutions) in a wild-type or unmodified CD80 sequence. The one or more amino acid modifications (e.g., substitutions) can be in the ectodomain (extracellular domain) of the wild-type or unmodified CD80 sequence, such as the extracellular domain. In some embodiments, the one or more amino acid modifications (e.g., substitutions) are in the IgV domain or specific binding fragment thereof. In some embodiments, the one or more amino acid modifications (e.g., substitutions) are in the IgC domain or specific binding fragment thereof. In some embodiments of the variant CD80 polypeptide, some of the one or more amino acid modifications (e.g., substitutions) are in the IgV domain or a specific binding fragment thereof, and some of the one or more amino acid modifications (e.g., substitutions) are in the IgC domain or a specific binding fragment thereof.

[0295] In some embodiments, the variant CD80 polypeptide has up to 1, 2, 3, 4, 5, 6, 7, 8, 9, 10, 11, 12, 13, 14, 15, 16, 17, 18, 19, or 20 amino acid modifications (e.g., substitutions). The modifications (e.g., substitutions) can be in the IgV domain or the IgC domain. In some embodiments, the variant CD80 polypeptide has up to 1, 2, 3, 4, 5, 6, 7, 8, 9, 10, 11, 12, 13, 14, 15, 16, 17, 18, 19, or 20 amino acid modifications (e.g., substitutions) in the IgV domain or specific binding fragment thereof. In some embodiments, the variant CD80 polypeptide has up to 1, 2, 3, 4, 5, 6, 7, 8, 9, 10, 11, 12, 13, 14, 15, 16, 17, 18, 19, or 20 amino acid modifications (e.g., substitutions) in the IgC domain or specific binding fragment thereof. In some embodiments, the variant CD80 polypeptide has at least about 85%, 86%, 86%, 88%, 89%, 90%, 91%, 92%, 93%, 94%, 95%, 96%, 97%, 98%, or 99% sequence identity with the wild-type or unmodified CD80 polypeptide or specific binding fragment thereof, such as the amino acid sequence of SEQ ID NO: 2, 76, 150, or 1245.

[0296] In some embodiments, the variant CD80 polypeptide has one or more amino acid modifications (e.g., substitutions) in an unmodified CD80 or specific binding fragment there of corresponding to position(s) 4, 7, 9, 10, 11, 12, 13, 14, 15, 16, 17, 18, 20, 21, 22, 23, 24, 25, 26, 27, 28, 29, 30, 31, 33, 34, 35, 36, 37, 38, 40, 41, 42, 43, 44, 46, 47, 48, 49, 50, 51, 52, 53, 54, 55, 57, 58, 59, 60, 61, 62, 63, 64, 65, 66, 67, 68, 69, 70, 71, 72, 73, 74, 76, 77, 78, 79, 80, 81, 82, 83, 84, 85, 86, 87, 88, 89, 90, 91, 92, 93, 94, 95, 96, 97, 99, 102, 103, 104, 107, 108, 109, 110, 114, 115, 116, 117, 118, 120, 121, 122, 126, 127, 128, 129, 130, 133, 137, 140, 142, 143, 144, 148, 149, 152, 154, 160, 162, 164, 168, 169, 174, 175, 177, 178, 182, 183, 185, 178, 185, 188, 190, 192, 193, or 199 with reference to numbering of SEQ ID NO: 2. In some embodiments, such variant CD80 polypeptides exhibit altered binding affinity to one or more of CD28, PD-L1, or CTLA-4 compared to the wild-type or unmodified CD80 polypeptide. For example, in some embodiments, the variant CD80 polypeptide exhibits increased binding affinity to CD28, PD-L1, and/or CTLA-4 compared to a wild-type or unmodified CD80 polypeptide.

[0297] In some embodiments, the variant CD80 polypeptide has one or more amino acid substitution selected from V4M, E7D, K9E, E10R, V11S, A12G, A12T, A12V, T13A, T13N, T13R, L14A, S15F, S15P, S15T, S15V, C16G, C16L, C16R, C16S, G17W, H18A, H18C, H18F, H18I, H18L, H18R, H18T, H18V, H18Y, V20A, V20I, V20L, S21P, V22A, V22D, V22I, V22L, E23D, E23G, E24D, E24G, L25P, L25S, A26D, A26E, A26G, A26H, A26K, A26N, A26P, A26Q, A26R, A26S, A26T, Q27H, Q27L, Q27R, T28A, T28S, T28Y, R29C, R29D, R29H, R29V, I30F, I30T, I30V, Y31C, Y31F, Y31H, Y31L, Y31S, Q33E, Q33H, Q33K, Q33L, Q33R, K34E, E35D, E35G, K36E, K36G, K36R, K37E, K37Q, M38I, M38L, M38T, M38V, L40M, T41A, T41D, T41G, T41I, T41S, M42I, M42T, M42V, M43I, M43L, M43Q, M43R, M43T, M43V, S44P, D46E, D46N, D46V, M47F, M47I, M47L, M47T, M47V, M47Y, N48D, N48H, N48I, N48K, N48R, N48S, N48T, N48Y, I49V, W50G, P51A, E52D, E52G, Y53C, Y53F, Y53H, K54E, K54M, K54N, K54R, N55D, N55I, T57A, T57I, I58V, F59L, F59S, D60V, I61F, I61N, I61V, T62A, T62N, T62S, N63D, N63S, N64S, L65H, L65P, S66H, I67F, I67L, I67T, I67V, V68A, V68E, V68I, V68L, V68M, I69F, I69T, L70M, L70P, L70Q, L70R, A71D, A71G, L72P, L72V, R73H, R73S, P74L, P74S, D76G, D76H, E77A, E77G, E77K, G78A, T79A, T79I, T79L, T79M, T79P, Y80N, E81A, E81G, E81K, E81R, E81V, C82R, V83A, V83I, V84A, V84I, L85E, L85I, L85M, L85Q, L85R, K86E, K86M, Y87C, Y87D, Y87H, Y87N, Y87Q, E88D, E88G, E88V, K89E, K89N, K89R, D90G, D90K, D90L, D90N, D90P, A91E, A91G, A91S, A91T, A91V, F92L, F92N, F92P, F92S, F92V, F92Y, K93I, K93E, K93Q, K93R, K93T, K93V, R94F, R94G, R94L, R94Q, R94W, E95D, E95K, E95V, H96R, L97M, L97R, L97Q, E99D, E99G, L102S, S103L, S103P, V104A, V104L, D107N, F108L, P109H, P109S, T110A, S114T, D115G, F116L, F116S, E117V, E117G, I118A, I118T, I118V, T120S, S121P, N122S, I126L, I126V, I127T, C128R, C128Y, S129L, S129P, T130A, G133D, P137L, S140T, L142S, E143G, N144D, N144S, L148S, N149D, N149S, N152T, T154A, T154I, E160G, E162G, Y164H, S168G, K169E, K169I, K169S, M174T, M174V, T175A, N177S, H178R, C182S, L183H, K185E, H188D, H188Q, R190S, N192D, Q193L, or T199S.

[0298] In some embodiments, the one or more amino acid modification, e.g. substitution is L70P, I30F/L70P, Q27H/T41S/A71D, I30T/L70R, T13R/C16R/L70Q/A71D, T57I, M43I/C82R, V22L/M38V/M47T/A71D/L85M, I30V/T57I/L70P/A71D/A91T, V22I/L70M/A71D, N55D/L70P/E77G, T57A/I69T, N55D/K86M, L72P/T79I, L70P/F92S, T79P, E35D/M47I/L65P/D90N, L25S/E35D/M47I/D90N, A71D, E81K/A91S, A12V/M47V/L70M, K34E/T41A/L72V, T41S/A71D/V84A, E35D/A71D, E35D/M47I, K36R/G78A, Q33E/T41A, M47V/N48H, M47L/V68A, S44P/A71D, Q27H/M43I/A71D/R73S, E35D/T57I/L70Q/A71D, M47I/E88D, M42I/I61V/A71D, P51A/A71D, H18Y/M47I/T57I/A71G, V20I/M47V/T57I/V84I, V20I/M47V/A71D, A71D/L72V/E95K, V22L/E35G/A71D/L72P, E35D/A71D, E35D/I67L/A71D, Q27H/E35G/A71D/L72P/T79I, T13R/M42V/M47I/A71D, E35D, E35D/M47I/L70M, E35D/A71D/L72V, E35D/M43L/L70M, A26P/E35D/M43I/L85Q/E88D, E35D/D46V/L85Q, Q27L/E35D/M47I/T57I/L70Q/E88D, M47V/I69F/A71D/V83I, E35D/T57A/A71D/L85Q, H18Y/A26T/E35D/A71D/L85Q, E35D/M47L, E23D/M42V/M43I/I58V/L70R, V68M/L70M/A71D/E95K, N55I/T157I69F, E35D/M43I/A71D, T41S/T57I/L70R, H18Y/A71D/L72P/E88V, V20I/A71D, E23G/A26S/E35D/T62N/A71D/L72V/L85M, A12T/E24D/E35D/D46V/I61V/L72P/E95V, V22L/E35D/M43L/A71G/D76H, E35G/K54E/A71D/L72P, L70Q/A71D, A26E/E35D/M47L/L85Q, D46E/A71D, Y31H/E35D/T41S/V68L/K93R/R94W, A26E/Q33R/E35D/M47L/L85Q/K86E, A26E/Q33R/E35D/M47L/L85Q, E35D/M47L/L85Q, A26E/Q33L/E35D/M47L/L85Q, A26E/Q33L/E35D/M47L, H18Y/A26E/Q33L/E35D/M47L/L85Q, Q33L/E35D/M47I, H18Y/Q33L/E35D/M47I, Q33L/E35D/D46E/M47I, Q33R/E35D/D46E/M47I, H18Y/E35D/M47L, Q33L/E35D/M47V, Q33L/E35D/M47V/T79A, Q33L/E35D/T41S/M47V, Q33L/E35D/M47I/L85Q, Q33L/E35D/M47I/T62N/L85Q, Q33L/E35D/M47V/L85Q, A26E/E35D/M43T/M47L/L85Q/R94Q, Q33R/E35D/K37E/M47V/L85Q, V22A/E23D/Q33L/E35D/M47V, E24D/Q33L/E35D/M47V/K54R/L85Q, S15P/Q33L/E35D/M47L/L85Q, E7D/E35D/M47I/L97Q, Q33L/E35D/T41S/M43I, E35D/M47I/K54R/L85E, Q33K/E35D/D46V/L85Q, Y31S/E35D/M47L/T79L/E88G, H18L/V22A/E35D/M47L/N48T/L85Q, Q27H/E35D/M47L/L85Q/R94Q/E95K, Q33K/E35D/M47V/K89E/K93R, E35D/M47I/E77A/L85Q/R94W, A26E/E35D/M43I/M47L/L85Q/K86E/R94W, Q27H/Q33L/E35D/M47V/N55D/L85Q/K89N, H18Y/V20A/Q33L/E35D/M47V/V53F, V22A/E35D/V68E/A71D, Q33L/E35D/M47L/A71G/F92S, V22A/R29H/E35D/D46E/M47I, Q33L/E35D/M43I/L85Q/R94W, H18Y/E35D/V68M/L97Q, Q33L/E35D/M47L/V68M/L85Q/E88D, Q33L/E35D/M43V/M47I/A71G, E35D/M47L/A71G/L97Q, E35D/M47V/A71G/L85M/L97Q, H18Y/Y31H/E35D/M47V/A71G/L85Q, E35D/D46E/M47V/L97Q, E35D/D46V/M47I/A71G/F92V, E35D/M47V/T62A/A71G/V83A/Y87H/L97M, Q33L/E35D/N48K/L85Q/L97Q, E35D/L85Q/K93T/E95V/L97Q, E35D/M47V/N48K/V68M/K89N, Q33L/E35D/M47I/N48D/A71G, R29H/E35D/M43V/M47I/I49V, Q27H/E35D/M47I/L85Q/D90G, E35D/M47I/L85Q/D90G, E35D/M47I/T62S/L85Q, A26E/E35D/M47L/A71G, E35D/M47I/Y87Q/K89E, V22A/E35D/M47I/Y87N, H18Y/A26E/E35D/M47L/L85Q/D90G, E35D/M47L/A71G/L85Q, E35D/M47V/A71G/E88D, E35D/A71G, E35D/M47V/A71G, I30V/E35D/M47V/A71G/A91V, I30V/V31C/E35D/M47V/A71G/L85M, V22D/E35D/M47L/L85Q, H18Y/E35D/N48K, E35D/T41S/M47V/A71G/K89N, E35D/M47V/N48T/L85Q, E35D/D46E/M47V/A71D/D90G, E35D/D46E/M47V/A71D, E35D/T41S/M43I/A71G/D90G, E35D/T41S/M43I/M47V/A71G, E35D/T41S/M43I/M47L/A71G, H18Y/Y22A/E35D/M47V/T62S/A71G, H18Y/A26E/E35D/M47L/V68M/A71G/D90G, E35D/K37E/M47V/N48D/L85Q/D90N, Q27H/E35D/D46V/M47L/A71G, V22L/Q27H/E35D/M47I/A71G, E35D/D46V/M47L/V68M/L85Q/E88D, E35D/T41S/M43V/M47I/L70M/A71G, E35D/D46E/M47V/N63D/L85Q, E35D/M47V/T62A/A71D/K93E, E35D/D46E/M47V/V68M/D90G/K93E, E35D/M43I/M47V/K89N, E35D/M47L/A71G/L85M/F92Y, E35D/M42V/M47V/E52D/L85Q, V22D/E35D/M47L/L70M/L97Q, E35D/T41S/M47V/L97Q, E35D/Y53H/A71G/D90G/L97R, E35D/A71D/L72V/R73H/E81K, Q33L/E35D/M43L/Y53F/T62S/L85Q, E35D/M38T/D46E/M47V/N48S, Q33R/E35D/M47V/N48K/L85M/F92L, E35D/M38T/M43V/M47V/N48R/L85Q, T28Y/Q33H/E35D/D46V/M47I/A71G, E35D/N48K/L72V, E35D/T41S/N48T, D46V/M47I/A71G, M47I/A71G, E35D/M43I/M47L/L85M, E35D/M43I/D46E/A71G/L85M, H18Y/E35D/M47L/A71G/A91S, E35D/M47I/N48K/I61F, E35D/M47V/T62S/L85Q, M43I/M47L/A71G, E35D/M47V, E35D/M47L/A71G/L85M, V22A/E35D/M47L/A71G, E35D/M47L/A71G, E35D/D46E/M47I, Q27H/E35D/M47I, E35D/D46E/L85M, E35D/D46E/A91G, E35D/D46E, E35D/L97R, H18Y/E35D, Q27L/E35D/M47V/I61V/L85M, E35D/M47V/I61V/L85M, E35D/M47V/L85M/R94Q, E35D/M47V/N48K/L85M, H18Y/E35D/M47V/N48K, A26E/Q27R/E35D/M47L/N48Y/L85Q, E35D/D46E/M47L/V68M/L85Q/F92L, E35D/M47I/T62S/L85Q/E88D, E24D/Q27R/E35D/T41S/M47V/L85Q, S15T/H18Y/E35D/M47V/T62A/N64S/A71G/L85Q/D90N, E35D/M47L/V68M/A71G/L85Q/D90G, H18Y/E35D/M47I/V68M/A71G/R94L, deltaE10-A98, Q33R/M47V/T62N/A71G, H18Y/Y22A/E35D/T41S/M47V/T62N/A71G/A91G, E35D/M47L/L70M, E35D/M47L/V68M, E35D/D46V/M47L/V68M/E88D, E35D/D46V/M47L/V68M/D90G, E35D/D46V/M47L/V68M/K89N, E35D/D46V/M47L/V68M/L85Q, E35D/D46V/M47L/V68M, E35D/D46V/M47L/V70M, E35D/D46V/M47L/V70M/L85Q, E35D/M47V/N48K/V68M, E24D/E35D/M47L/V68M/E95V/L97Q, E35D/D46E/M47I/T62A/V68M/L85M/Y87C, E35D/D46E/M47I/V68M/L85M, E35D/D46E/M47L/V68M/A71G/Y87C/K93R, E35D/D46E/M47L/V68M/T79M/L85M, E35D/D46E/M47L/V68M/T79M/L85M/L97Q, E35D/D46E/M47V/V68M/L85Q, E35D/M43I/M47L/V68M, E35D/M47I/V68M/Y87N, E35D/M47L/V68M/E95V/L97Q, E35D/M47L/Y53F/V68M/A71G/K93R/E95V, E35D/M47V/N48K/V68M/A71G/L85M, E35D/M47V/N48K/V68M/L85M, E35D/M47V/V68M/L85M, E35D/M47V/V68M/L85M/Y87D, E35D/T41S/D46E/M47I/V68M/K93R/E95V, H18Y/E35D/D46E/M47I/V68M/R94L, H18Y/E35D/M38I/M47L/V68M/L85M, H18Y/E35D/M47I/V68M/Y87N, H18Y/E35D/M47L/V68M/A71G/L85M, H18Y/E35D/M47L/V68M/E95V/L97Q, H18Y/E35D/M47L/Y53F/V68M/A71G, H18Y/E35D/M47L/Y53F/V68M/A71G/K93R/E95V, H18Y/E35D/M47V/V68M/L85M, H18Y/E35D/V68M/A71G/R94Q/E95V, H18Y/E35D/V68M/L85M/R94Q, H18Y/E35D/V68M/T79M/L85M, H18Y/Y22D/E35D/M47V/N48K/V68M, Q27L/Q33L/E35D/T41S/M47V/N48K/V68M/L85M, Q33L/E35D/M47V/T62S/V68M/L85M, Q33R/E35D/M38I/M47L/V68M, R29C/E35D/M47L/V68M/A71G/L85M, S21P/E35D/K37E/D46E/M47I/V68M, S21P/E35D/K37E/D46E/M47I/V68M/R94L, T13R/E35D/M47L/V68M, T13R/H18Y/E35D/V68M/L85M/R94Q, T13R/Q27L/Q33L/E35D/T41S/M47V/N48K/V68M/L85M, T13R/Q33L/E35D/M47L/V68M/L85M, T13R/Q33L/E35D/M47V/T62S/V68M/L85M, T13R/Q33R/E35D/M38I/M47L/V68M, T13R/Q33R/E35D/M38I/M47L/V68M/E95V/L97Q, T13R/Q33R/E35D/M38I/M47L/V68M/L85M, T13R/Q33R/E35D/M38I/M47L/V68M/L85M/R94Q, T13R/Q33R/E35D/M47L/V68M, T13R/Q33R/E35D/M47L/V68M/L85M, V22D/E24D/E35D/M47L/V68M, V22D/E24D/E35D/M47L/V68M/L85M/D90G, V22D/E24D/E35D/M47V/V68M, D46V, M47L, V68M, L85Q, E35D/D46V, E35D/V68M, E35D/L85Q, D46V/M47L, D46V/V68M, D46V/L85Q, M47L/V68M, M47L/L85Q, V68M/L85Q, E35D/D46V/M47L, E35D/D46V/V68M, E35D/D46V/L85Q, E35D/V68M/L85Q, D46V/M47L/V68M, D46V/M47L/L85Q, D46V/V68M/L85Q, M47L/V68M/L85Q, E35D/D46V/M47L/L85Q, E35D/D46V/V68M/L85Q, E35D/M47L/V68M/L85Q, D46V/M47L/V68M/L85Q, M47V, N48K, K89N, E35D/N48K, E35D/K89N, M47V/N48K, M47V/V68M, M47V/K89N, N48K/V68M, N48K/K89N, V68M/K89N, E35D/M47V/N48K, E35D/M47V/V68M, E35D/M47V/K89N, E35D/N48K/V68M, E35D/N48K/K89N, E35D/V68M/K89N, M47V/N48K/V68M, M47V/N48K/K89N, M47V/V68M/K89N, N48K/V68M/K89N, E35D/M47V/N48K/K89N, E35D/M47V/V68M/K89N, E35D/N48K/V68M/K89N, M47V/N48K/V68M/K89N, E35D/D46V/M47V/N48K/V68M, E35D/D46V/M47V/V68M/L85Q, E35D/D46V/M47V/V68M/K89N, E35D/M47V/N48K/V68M/L85Q, E35D/M47V/V68M/L85Q/K89N, A26E/E35D/M47L/V68M/A71G/D90G, H18Y/E35D/M47L/V68M/A71G/D90G, H18Y/A26E/M47L/V68M/A71G/D90G, H18Y/A26E/E35D/V68M/A71G/D90G, H18Y/A26E/E35D/M47L/A71G/D90G, H18Y/A26E/E35D/M47L/V68M/D90G, H18Y/A26E/E35D/M47L/V68M/A71G, E35D/M47L/V68M/A71G/D90G, H18Y/M47L/V68M/A71G/D90G, H18Y/A26E/V68M/A71G/D90G, H18Y/A26E/E35D/A71G/D90G, H18Y/A26E/E35D/M47L/D90G, H18Y/A26E/E35D/M47L/V68M, A26E/M47L/V68M/A71G/D90G, A26E/E35D/V68M/A71G/D90G, A26E/E35D/M47L/A71G/D90G, A26E/E35D/M47L/V68M/D90G, A26E/E35D/M47L/V68M/A71G, H18Y/E35D/V68M/A71G/D90G, H18Y/E35D/M47L/A71G/D90G, H18Y/E35D/M47L/V68M/D90G, H18Y/E35D/M47L/V68M/A71G, H18Y/A26E/M47L/A71G/D90G, H18Y/A26E/M47L/V68M/D90G, H18Y/A26E/M47L/V68M/A71G, H18Y/A26E/E35D/V68M/D90G, H18Y/A26E/E35D/V68M/A71G, H18Y/A26E/E35D/M47L/A71G, M47L/V68M/A71G/D90G, H18Y/V68M/A71G/D90G, H18Y/A26E/A71G/D90G, H18Y/A26E/E35D/D90G, H18Y/A26E/E35D/M47L, E35D/V68M/A71G/D90G, E35D/M47L/A71G/D90G, E35D/M47L/V68M/D90G, E35D/M47L/V68M/A71G, A26E/V68M/A71G/D90G, A26E/M47L/A71G/D90G, A26E/M47L/V68M/D90G, A26E/M47L/V68M/A71G, A26E/E35D/A71G/D90G, A26E/E35D/V68M/D90G, A26E/E35D/V68M/A71G, A26E/E35D/M47L/D90G, A26E/E35D/M47L/V68M, H18Y/M47L/A71G/D90G, H18Y/M47L/V68M/D90G, H18Y/M47L/V68M/A71G, H18Y/E35D/A71G/D90G, H18Y/E35D/V68M/D90G, H18Y/E35D/V68M/A71G, H18Y/E35D/M47L/D90G, H18Y/E35D/M47L/A71G, H18Y/E35D/M47L/V68M, H18Y/A26E/V68M/D90G, H18Y/A26E/V68M/A71G, H18Y/A26E/M47L/D90G, H18Y/A26E/M47L/A71G, H18Y/A26E/M47L/V68M, H18Y/A26E/E35D/A71G, H18Y/A26E/E35D/V68M, H18Y/E35D/M47V/V68M/A71G, H18C/A26P/E35D/M47L/V68M/A71G, H18I/A26P/E35D/M47V/V68M/A71G, H18L/A26N/D46E/V68M/A71G/D90G, H18L/E35D/M47V/V68M/A71G/D90G, H18T/A26N/E35D/M47L/V68M/A71G, H18V/A26K/E35D/M47L/V68M/A71G, H18V/A26N/E35D/M47V/V68M/A71G, H18V/A26P/E35D/M47V/V68L/A71G, H18V/A26P/E35D/M47L/V68M/A71G, H18V/E35D/M47V/V68M/A71G/D90G, H18Y/A26P/E35D/M47U/V68M/A71G, H18Y/A26P/E35D/M47V/V68M/A71G, H18Y/E35D/M47V/V68L/A71G/D90G, H18Y/E35D/M47V/V68M/A71G/D90G, A26P/E35D/M47I/V68M/A71G/D90G, H18V/A26G/E35D/M47V/V68M/A71G/D90G, H18V/A26S/E35D/M47L/V68M/A71G/D90G, H18V/A26R/E35D/M47L/V68M/A71G/D90G, H18V/A26D/E35D/M47V/V68M/A71G/D90G, H18V/A26Q/E35D/M47V/V68L/A71G/D90G, H18A/A26P/E35D/M47L/V68M/A71G/D90G, H18A/A26N/E35D/M47L/V68M/A71G/D90G, H18F/A26P/E35D/M47I/V68M/A71G/D90G, H18F/A26H/E35D/M47L/V68M/A71G/D90G, H18F/A26N/E35D/M47V/V68M/A71G/D90K, H18Y/A26N/E35D/M47F/V68M/A71G/D90G, H18Y/A26P/E35D/M47V/V68U/A71G/D90G, H18Y/A26Q/E35D/M47T/V68M/A71G/D90G, H18R/A26P/E35D/D46N/M47V/V68M/A71G/D90P, H18F/A26D/E35D/D46E/M47T/V68M/A71G/D90G, L70Q/A91G, L70Q/A91G/T130A, L70Q/A91G/I118A/T120S/T130A, V4M/L70Q/A91G/T120S/T130A, L70Q/A91G/T120S/T130A, V20L/L70Q/A91S/T120S/T130A, S44P/L70Q/A91G/T130A, L70Q/A91G/E117G/T120S/T130A, A91G/T120S/T130A, L70R/A91G/T120S/T130A, L70Q/E81A/A91G/T120S/I127T/T130A, L70Q/Y87N/A91G/T130A, T28S/L70Q/A91G/E95K/T120S/T130A, N63S/L70Q/A91G/T120S/T130A, K36E/167T/L70Q/A91G/T120S/T130A/N152T, E52G/L70Q/A91G/T120S/T130A, K37E/F59S/L70Q/A91G/T120S/T130A, A91G/S103P, K89E/T130A, D60V/A91G/T120S/T130A, K54M/A91G/T120S, M38T/L70Q/E77G/A91G/T120S/T130A/N152T, R29H/E52G/L70R/E88G/A91G/T130A, Y31H/T41G/L70Q/A91G/T120S/T130A, V68A/T110A, S66H/D90G/T110A/F116L, R29H/E52G/T120S/T130A, A91G/L102S, I67T/L70Q/A91G/T120S, L70Q/A91G/T110A/T120S/T130A, M38V/T41D/M43I/W50G/D76G/V83A/K89E/T120S/T130A, V22A/L70Q/S121P, A12V/S15F/Y31H/T41G/T130A/P137L/N152T, I67F/L70R/E88G/A91G/T120S/T130A, E24G/L25P/L70Q/T120S, A91G/F92L/F108L/T120S, R29D/Y31L/Q33H/K36G/M38I/T41A/M43R/M47T/E81V/L85R/K89N/A91T/F92P/K93V/R94L/I118T/N149S, R29D/Y31L/Q33H/K36G/M38I/T41A/M43R/M47T/E81V/L85R/K89N/A91T/F92P/K93V/R94L/N144S/N149S, R29D/Y31L/Q33H/K36G/M38I/T41A/M42T/M43R/M47T/E81V/L85R/K89N/A91T/F92P/K93V/R94L/L148S/N149S, E24G/R29D/Y31L/Q33H/K36G/M38I/T41A/M43R/M47T/F59L/E81V/L85R/K89N/A91T/F92P/K93V/R94L/H96R/N149S/C182S, R29D/Y31L/Q33H/K36G/M38I/T41A/M43R/M47T/E81V/L85R/K89N/A91T/F92P/K93V/R94L/N149S, R29V/M43Q/E81R/L85I/K89R/D90L/A91E/F92N/K93Q/R94G, T41I/A91G, K89R/D90K/A91G/F92Y/K93R/N122S/N177S, K89R/D90K/A91G/F92Y/K93R, K36G/K37Q/M38I/F59L/E81V/L85R/K89N/A91T/F92P/K93V/R94L/E 99G/T130A/N149S, E88D/K89R/D90K/A91G/F92Y/K93R, K36G/K37Q/M38I/L40M, R29H/Y31H/T41G/Y87N/E88G/K89E/D90N/A91G/P109S, A12T/H18L/M43V/F59L/E77K/P109S/I118T, R29V/Y31F/K36G/M38L/M43Q/E81R/V83I/L85I/K89R/D90L/A91E/F92N/K93Q/R94G, V68M/L70P/L72P/K86E, R29D/Y31L/Q33H/K36G/M38I/T41A/M43R/M47T/E81V/L85R/K89N/A91T/F92P/K93V/R94L/T120S/I127T/T130A/K169E, R29D/Y31L/Q33H/K36G/M38I/T41A/M43R/M47T/L70Q/E81V/L85R/K89N/A91 T/F92P/K93V/R94L/T120S/I127T/T130A, H18L/R29D/Y31L/Q33H/K36G/M38I/T41A/M43R/M47T/E81V/L85R/K89N/A91T/F92P/K93V/R94L/T120S/I127T/T130A/K169E, R29D/Y31L/Q33H/K36G/M38I/T41A/M43R/M47T/E81V/L85R/K89N/A91T/F92P/K93V/R94L/T120S/T130A/M174T, R29D/Y31L/Q33H/K36G/M38I/T41A/M43R/M47T/F59L/E81V/L85R/K89N/A91T/F92P/K93V/R94L/T120S/I127T/T130A/H188D, H18R/R29D/Y31L/Q33H/K36G/K37E/M38I/T41A/M43R/M47T/L70Q/E81V/L85R/K89N/A91T/F92P/K93V/R94L/T120S/T130A/K169E/H188D, R29D/Y31L/Q33H/K36G/M38I/T41A/M43R/M 47T/L70Q/E81V/L85R/K89N/A91T/F92P/K93V/R94L/T120S/I127T/T130A/E143G/K169E/M174V/H188D, R29D/Y31L/Q33H/K36G/M38I/T41A/M43R/M47T/L70Q/E81V/L85R/K89N/A91T/F92P/K93V/R 94L/T120S/I127T/T130A, R29D/Y31L/Q33H/K36G/M38I/T41A/M43R/M47T/E81V/L85R/K89N/A91T/F92P/K93V/R94L/T120S/I127T/T130A/H188D, R29D/Y31L/Q33H/K36G/M38I/T41A/M43R/M47T/L70Q/E81V/L85R/K89N/A91T/F92P/K93V/R94L/T120S/I127T/T130A/K169E, R29D/Y31L/Q33H/K36G/M38I/T41A/M43R/M47T/L70Q/E81V/L85R/K89N/A91T/F92P/K93V/R94L/T120S/I127T/T130A, R29D/Y31L/Q33H/K36G/M38I/T41A/M43R/M47T/L85R/K89N/A91T/F92P/K93V/R94L/T120S/I127T/T130A/K169E/H188D, R29D/V31L/Q33H/K36G/M38I/T41A/M43R/M47T/E81V/L85R/K89N/A91T/F92P/K93V/R94L/F108L/T120S/T130A/K169E/H188D, R29D/Y31L/Q33H/K36G/M38I/T741A/M43R/M47T/L70Q/E81V/L85R/K89N/A91T/F92P/K93V/R94L/T130A/H188D, R29D/Y31L/Q33H/K36G/M38I/T41A/M43R/M47T/L70Q/E81V/L85R/K89N/A91T/F92P/K93V/R94L/T120S/I127T/T130A/K169E, H18L/R29D/V31L/Q33H/K36G/M38I/T41A/M43R/M47T/L70Q/E81V/L85R/K89N/A91T/F92P/K93V/R94L/T120S/T130A/K169E/H188D, R29D/V31L/Q33H/K36G/M38I/T41A/M43R/M47T/E81V/L85R/K 89N/A91T/F92P/K93V/R94I 120S/I127T/C128Y/T130A/H188D, R29D/V31L/Q33H/K36G/M38I/T41A/M43R/M47T/E81V/L85R/K89N/A91T/F92P/K93V/R94F/T130A/K169E, H18L/R29D/V31L/Q33H/K 36G/M38I/T41A/M43R/M47T/E81V/L85R/K89N/A91T/F92P/K93V/R94L/T 130A, H18L/R29D/V31L/Q 33H/K36G/M38I/T41A/M43R/M47T/L70Q/E81V/L85R/K89N/A91T/F92P/K93V/R94L/T120S/T130A/K169E, R29D/V31L/Q33H/K36G/M38I/T41A/M43R/M47T/L70Q/E81V/L85R/K89N/A91T/F92P/K93I/R94L/L97R/T130A, R29D/V31L/Q33H/K36G/M38I/T41A/M43R/M47T/L70Q/E81V/L85R/K89N/A91T/F92P/K93I/R94L/L97R/T130A/L148S, H18L/R29D/Y31L/Q33H/K36G/M38I/T41A/M43R/M47T/E81V/L85R/K89N/A91T/F92P/K93V/R94L/I118V/T120S/I127T/T130A/K169E, R29D/V31L/Q33H/K36G/M38I/T41A/M43R/M47T/I61N/E81V/L85R/K89N/A91T/F92P/K93V/R94F/V104A/T120S/T130A, R29D/Y 31L/Q33H/K36G/M38I/T41A/M43R/M47T/E81V/L85R/K89N/F92P/K93V/R94F/I118V/T130A, R29D/Y31L/Q33H/K36G/M38I/T41A/M43R/M47T/T62S/E81V/L85R/K89N/A91T/F92P/K93V/R94L/I118V/T120S/T130A/K169E/T175A, H18L/R29D/V31L/Q33H/K36G/M38I/T41A/M43R/M47T/E81V/L85R/K 89N/A91T/F92P/K93V/R94L/F116S/T130A/H188D, H18L/R29D/Y31L/Q33H/K36G/M38I/T41A/M43R/M47T/E81V/L85R/K89N/A91T/F92P/K93V/R94I 120S/I127T/T130A/L142S/H188D, C16S/H18L/R29D/V31L/Q33H/K36G/M38I/T41A/M43R/M47T/E81V/L85R/K89N/A91T/F92P/K93V/R94L/T110A/H188D, R29D/V31L/Q33H/K36G/M38I/T41A/M43R/M47T/A91G/T120S/I127T/T130A/H188D, R29D/V31L/Q33H/K36G/M38I/T41A/M43R/M47T/L70Q/D76G/A91G/S103L/T120S/I127T/T130A, DELTAQ33N53C/L85R/K89N/A91T/F92P/K93V/R94I/T120S/I127T/T130A/K169E, T62S/E81V/L85R/K89N/A91T/F92P/K93V/R94L/T120S/T130A/K169E, R29D/V31L/Q33H/K36G/M38 I/T41A/M43R/M47T/E81V/L85R/K89N/A91T/F92P/K93V/R94L/S129L/H188D, K9E/E10R/V11S/A12 G/T13N/K14A/S15V/C16L/G17W/H18Y/Y53C/L70Q/D90G/T130A/N149D/N152T/H188D, H18L/R29D/V31L/Q33H/K36G/T41A/M43R/M47T/E81V/L85R/K89N/A91T/F92P/K93V/R94L/I118V/T120S/I127T/T130A/H188D, K89E/K93E/T130A, S21P/R29D/V31L/Q33H/K36G/M38I/T41A/M43R/M47T/N48I/V68A/E81V/L85R/K89N/A91T/F92P/K 93V/R94L/P109H/I126L/K169I, H18L/R29D/V31L/Q33H/K36G/M38I/T41A/M43R/M47T/P74L/Y80N/E81V/L85R/K89N/A91T/F92P/K93V/R94L/L97R, S21P/R29D/V31L/Q33H/K36G/M38I/T41A/M43R/M 47T/P74L/Y80N/E81V/L85R/K89N/D90N/A91T/F92P/K93V/R94L/T130A/N149S/E162G, H18L/R29D/V31L/Q33H/K36G/M38I/T41A/M43R/M47T/V68M/E81V/L85R/K89N/A91T/F92P/K93V/R94L/T1730A, R29D/V31L/Q33H/K36G/M38I/T41A/M43R/M47T/V68M/E81V/L85R/K89N/A91T/F92P/K93V/R94L/T130A/N149S/R190S, H18L/R29D/V31L/Q33H/K36G/M38I/T41A/M43R/M47T/P74L/Y80N/E81V/L85R/K89N/A91T/F92P/K93V/R94L/T130A/R190S, C16G/V22A/R29D/V31L/Q33H/K36G/M38I/T41A/M43R/M47T/V68M/D76G/E81V/L85R/K89N/A91T/F92P/K93V/R94L/I118T/T130A/S140 T/N149S/K169I/H178R/N192D, R29D/V31L/Q33H/K36G/M38I/T41A/M43R/M47T/E81V/L85R/K89N/A91T/F92P/K93V/R94F/E117V/I118T/N149S/S168G/H188Q, V22A/R29D/V31L/Q33H/K36G/M38I/T41A/M43R/M47T/V68M/E81V/L85R/K89N/A91T/F92P/K93V/R94L/T130A, R29D/V31L/Q33H/K36G/M38I/T41A/M43R/M47T/N64S/E81V/L85R/K89N/A91T/F92P/K93V/R94F/I 118T/T130A/N149S/K169I, V22A/R29D/V31L/Q33H/K36G/M38I/T41A/M43R/M47T/V68M/E81V/L85R/K89N/A91T/F92P/K93V/R94L/D115G/I118T/T130A/G133D/N149S, S129P, A91G/S129P, I69T/L70Q/A91G/T120S, Y31H/S129P, T28A/R29D/V31L/Q33H/K36G/M38I/T41A/M43R/M47T/E81V/L85R/K89N/A91T/F92P/K93V/R94L/V104L/T130A/N149S, H18L/R29D/V31L/Q33H/K36G/M38I/T41A/M43R/M47T/E81V/L85R/K89N/A91T/F92P/K93V/R94L/L97R/N149S/H188Q, H18L/R29D/V31L/Q33H/K36G/M38I/T41A/M43R/M47T/E 81V/L85R/K89N/A91T/F92P/K93V/R94L/L97R/N149S, H18L/R29D/V31L/Q33H/K36G/M38I/T41A/M 43R/M47T/V68A/E81V/L85R/K89N/A91T/F92P/K93V/R94L/T 130A/N149S/T154I, A12G/R29D/Y31L/Q33H/K36G/M38I/T41A/M43R/M47T/V68A/E81V/L85R/K89N/A91T/F92P/K93V/R94L/L97R/T130A/L183H, R29D/V31L/Q33H/K36G/M38I/T41A/M43R/M47T/E81V/L85R/K89N/A91T/F92P/K93V/R94L/I118T/T130A/S140T/N149S/K169S, R29D/V31L/Q33H/K36G/M38I/T41A/M43R/M47T/E81V/L85R/K89N/A91T/F92P/K93V/R94L/I118T/T130A/N149S/K169I/Q193L, V22A/R29D/V31L/Q33H/K36G/M38I/T41A/M43R/M47T/E81V/L85R/K89N/A91T/F92P/K93V/R94L/I118T/T130A/N149S, R29D/V31L/Q33H/K36G/M38I/T41A/M43R/M47T/E81V/L85R/K89N/A91T/F92P/K93V/R94L/I118T/T130A/N149S, R29D/V31L/Q33H/K36G/M38I/T41A/M43R/M47T/E81V/L85R/K89N/A91T/F92P/K93V/R94L/I118T/T130A/N149S/K169I, R29D/V31L/Q33H/K36G/M38I/T41A/M43R/M47T/E81V/L85R/K 89N/A91T/F92P/K93V/R94L/T130A/N149S/K169I, I118T/C128R, Q27R/R29C/M42T/S129P/E160G, S129P/T154A, S21P/L70Q/D90G/T120S/T130A, L70Q/A91G/N144D, L70Q/A91G/I118A/T120S/T130A/K169E, V4M/L70Q/A91G/I118V/T120S/T130A/K169E, L70Q/A91G/I118V/T120S/T130A/K169E, L70Q/A91G/I118V/T120S/T130A, V20L/L70Q/A91S/I118V/T120S/T130A, L70Q/A91G/E117G/I118V/T120S/T130A, A91G/I118V/T120S/T130A, L70R/A91G/I118V/T120S/T130A/T199S, L70Q/E81A/A91G/I118V/T120S/I127T/T130A, T28S/L70Q/A91G/E95K/I118V/T120S/I126V/T130A/K169E, N63S/L70Q/A91G/S 114T/I118V/T120S/T130A, K36E/I67T/L70Q/A91G/I118V/T120S/T130A/N152T, E52G/L70Q/A91G/D107N/I118V/T120S/T130A/K169E, K37E/F59S/L70Q/A91G/I118V/T120S/T130A/K185E, D60V/A91G/I118V/T120S/T130A/K169E, K54M/L70Q/A91G/Y164H/T120S, M38T/L70Q/E77G/A91G/I118V/T120S/T130A/N152T, Y31H/T41G/M43L/L70Q/A91G/I118V/T120S/I126V/T130A, L65H/D90G/T110A/F116L, R29H/E52G/D90N/I118V/T120S/T130A, I67T/L70Q/A91G/I118V/T120S, L70Q/A91G/T110A/I118V/T120S/T130A, M38V/T41D/M43I/W50G/D76G/V83A/K89E/I118V/T120S/I126V/I 130A, A12V/S15F/Y31H/M38I/T41G/M43L/D90N/T130A/P137L/N149D/N152T, I67F/L70R/E88G/A91G/I118V/T120S/T130A, E24G/L25P/L70Q/A91G/I118V/T120S/N152T, A91G/F92L/F108L/I118V/T120S, E88D/K89R/D90K/A91G/F92Y/K93R/N122S/N177S, K36G/K37Q/M38I/L40M/F59L/E81V/L85R/K89N/A91T/F92P/K93V/R94L/E99G/T130A/N149S, K36G/L40M, R29D/Y31L/Q33H/K36G/M38I/T41A/M43R/M47T/E81V/L85R/K89N/A91T/F92P/K93V/R94L/I118V/T120S/I127T/T130A/K169E, R29D/Y31L/Q33H/K36G/M38I/T41A/M43R/M47T/L70Q/E81V/L85R/K89N/A91T/F92P/K93V/R94L/I118V/T120S/I127T/T130A, H18L/R29D/Y31L/Q33H/K36G/M38I/T41A/M43R/M47T/E81V/L85R/K89N/A91T/F92P/K93V/R94L/I118V/T120S/T127T/T7130A/K169E, R29D/Y31L/Q33H/K36G/M38I/T41A/M43R/M47T/E81V/L85R/K89N/A91T/F92P/K93V/R94L/I118V/T120S/T130A/K169E/M174T, R29D/Y31L/Q33H/K36G/M38I/T41A/M43R/M47T/N48D/F59L/E81V/L85R/K89N/A91T/F92P/K93V/R94L/I118V/T120S/I127T/T130A/H188D, H18R/R29D/Y31L/Q33H/K36G/K37E/M38I/T41A/M43R/M47T/L70Q/E81V/L85R/K89N/A91T/F92P/K93V/R94L/I118V/T120S/T130A/K169E/H188D, R29D/Y31L/Q33H/K36G/M38I/T41A/M43R/M47T/L 70Q/E81V/L85R/K89N/A91T/F92P/K93V/R94L/I118V/T120S/I127T/T130A/E143G/K169E/M174V/H188D, R29D/I30V/Y31L/Q33H/K36G/M38I/T41A/M43R/M47T/E81V/L85R/K89N/A91T/F92P/K93V/R94L/I118V/T120S/I127T/T130A/H188D, R29D/Y31L/Q33H/K36G/M38I/T41A/M43R/M47T/E81V/L85R/K89N/A91T/F92P/K93V/R94L/I118V/T120S/I27T/T130A/H188D, R29D/Y31L/Q33H/K36G/M38I/T41A/M43R/M47T/L70Q/E81V/L85R/K89N/A91T/F92P/K93V/R94L/I 118V/T120S/I127T/T130A/K169E, R29D/Y31L/Q33H/K36G/M38I/T41A/M43R/M47T/L70Q/E81V/K89N/A91T/F92P/K93V/R94L/I118V/T120S/I127T/T130A, R29D/Y31L/Q33H/K36G/M38I/T41A/M43R/M47T/L85R/K89N/A91T/F92P/K93V/R94L/I118V/T120S/I127T/T130A/K169E/H188D, R29D/Y31L/Q33H/K36G/M38I/T41A/M43R/M47T/E81V/L85R/K89N/A91T/F92P/K93V/R94L/F108U I118V/T120S/T130A/K169E/H188D, R29D/Y31L/Q33H/K36G/M38I/T41A/M43R/M47T/L70Q/E81V/L 85R/K89N/A91T/F92P/K93V/R94L/I118V/T120S/T130A/N149D/K169E/H188D, H18L/R29D/Y31L/Q33H/K36G/M38I/T41A/M43R/M47T/L70Q/E81V/L85R/K89N/A91T/F92P/K93V/R94L/I118V/T120S/T130A/K169E/H188D, R29D/Y31L/Q33H/K36G/M38I/T741A/M43R/M47T/E81V/L 85R/K89N/A91T/F92P/K93V/R94L/I118V/T120S/I127T/C128Y/T130A/H188D, H18L/R29D/Y31L/Q33H/K36G/M38I/T41A/M43R/M47T/E81V/L85R/K89N/A91T/F92P/K93V/R94L/E99D/T130A, H18L/R29D/V31L/Q33H/K36G/M38I/T41A/M43R/M47T/L70Q/E81V/L85R/K89N/A91T/F92P/K93V/R94L/I118V/T120S/T130A/K169E, R29D/Y31L/Q33H/K36G/M38I/T41A/M43R/M47T/I61N/E81V/L85R/K89N/A91T/F92P/K93V/R94F/V104A/I118V/T120S/I126V/T130A, R29D/Y31L/Q33H/K36G/M38I/T41A/M43R/M47T/E81V/L85R/K89N/A91T/F92P/K93V/R94F/I118V/T120S/T130A, R29D/Y31L/Q33H/K36G/M38V/T41A/M43R/M47T/T62S/E81V/L85R/K89N/A91T/F92P/K93V/R94L/I118V/T120S/T17130A/K169E/T175A, H18L/R29D/Y31L/Q33H/K36G/M38I/T41A/M43R/M47T/E81V/L85R/K89N/A91T/F92P/K93V/R94L/I118V/T120S/I127T/T130A/L142S/H188D, C16S/H118L/R29D/Y31L/Q33H/K36G/M38I/T41A/M43R/M47T/E81V/L85R/K89N/A91T/F92P/K93V/R94I 1710A/I118V/H188D, R29D/Y31L/Q33H/K36G/M38I/T41A/M43R/M47T/A91G/I118V/T7120S/I127T/1730A/H188D, R29D/Y31L/Q33H/K36G/M38I/T41A/M43R/M47T/L70Q/D76G/A91G/S103L/I118V/T120S/I127T/T130A, Y53C/L85R/K89N/A91T/F92P/K93V/R94L/I118V/T120S/I127T/T130A/K169, T62S/E81V/L85R/K89N/A91T/F92P/K93V/R94L/I118V/T120S/T130A/K169E, Y53C/L70Q/D90G/T130A/N149D/N152T/H188D, H18L/R29D/Y31L/Q33H/K36G/M38I/T41A/M43R/M47T/E81V/L85R/K89N/A91T/F92P/K93V/R94L/I118V/T120S/I127T/T130A/H188D, H18L/R29D/Y31L/Q33H/K36G/M38I/T41A/M43R/M47T/E81V/L85R/K89N/A91T/F92P/K93V/R94L/T130A/N149SS21P/L70Q/D90G/I118V/T120S/T130A, I67T/L70Q/A91G/I118V/T120S/T130A.

[0299] In some embodiments, the variant CD80 polypeptide has one or more amino acid modifications (e.g., substitutions) in an unmodified CD80 or specific binding fragment there of corresponding to position(s) 7, 23, 26, 34, 49, 51, 55, 57, 58, 71, 73, 78, 79, 82, and/or 84, with reference to numbering of SEQ ID NO: 2. In some embodiments, the variant CD80 polypeptide has one or more amino acid modifications (e.g., substitutions) in an unmodified CD80 or specific binding fragment there of corresponding to position(s) 7, 23, 26, 34, 49, 51, 55, 57, 58, 71, 73, 78, 79, 82, or 84 with reference to numbering of SEQ ID NO: 2. In some embodiments, the variant CD80 polypeptide has a modification, e.g., amino acid substitution, at any 2 or more of the foregoing positions, such as 2, 3, 4, 5, 6, 7, 8, 9, 10, 11, 12, 13, 14, 15 or more of the positions.

[0300] In some embodiments, the variant CD80 polypeptide has one or more amino acid substitution selected from among E7D, T13A, T13R, L14A, S15P, S15T, C16R, H18A, H18C, H18F, H18I, H18T, H18V, H18Y, V20A, V20I, V22D, V22I, V22L, E23D, E23G, E24D, L25S, A26D, A26E, A26G, A26H, A26K, A26N, A26P, A26Q, A26R, A26S, A26T, Q27H, Q27L, T28Y, I30F, I30T, Y31C, Y31S, Q33E, Q33K, Q33L, Q33R, K34E, E35D, E35G, K36R, T41S, M42I, M42V, M43T, D46E, D46N, D46V, M47F, M47I, M47L, M47V, M47Y, N48H, N48K, N48R, N48T, N48Y, I49V, P51A, E52D, Y53F, Y53H, K54E, K54N, K54R, N55D, N55I, T57A, T57I, I58V, I61F, I61V, T62A, T62N, N63D, L65P, I67L, I67V, V68E, V68I, V68L, I69F, L70M, A71D, A71G, L72V, R73H, R73S, P74S, D76H, E77A, G78A, T79A, T79I, T79L, T79M, T79P, E81G, E81K, C82R, V84A, V84I, L85M, L85Q, K86M, Y87C, Y87D, Y87H, Y87Q, E88V, D90P, A91V, F92S, F92V, K93T, R94Q, R94W, E95D, E95V, L97M, L97Q, and K169S.

[0301] In some embodiments, the variant CD80 polypeptide comprises the amino acid modifications L70P, I30F/L70P, Q27H41S/A71D, I30T/L70R, T13R/C16R/L70Q/A71D, T57I, M43I/C82R, V22L/M38V/M47T/A71D/L85M, I30V/T57I/L70P/A71D/A91T, V22I/L70M/A71D, N55D/L70P/E77G, T57A/I69T, N55D/K86M, L72P/T79I, L70P/F92S, T79P, E35D/M47I/L65P/D90N, L25S/E35D/M47I/D90N, A71D, T13A/I61N/A71D, E81K/A91S, A12V/M47V/L70M, K34E/T41A/L72V, T41S/A71D/V84A, E35D/A71D, E35D/M47I, K36R/G78A, Q33E/T41A, M47V/N48H, M47L/V68A, S44P/A71D, Q27H/M43I/A71D/R73S, E35D/T57I/L70Q/A71D, M47I/E88D, M42I/I61V/A71D, P51A/A71D, H18Y/M47I/T57I/A71G, V20I/M47V/T57I/V84I, V20I/M47V/A71D, A71D/L72V/E95K, V22L/E35G/A71D/L72P, E35D/A71D, E35D/I67L/A71D, Q27H/E35G/A71D/L72P/T79I, T13R/M42V/M47/A71D, E35D, E35D/M47I/L70M, E35D/A71D/L72V, E35D/M43L/L70M, A26P/E35D/M43I/L85Q/E88D, E35D/D46V/L85Q, Q27L/E35D/M47I/T57I/L70Q/E88D, M47V/I69F/A71D/V83I, E35D/T57A/A71D/L85Q, H18Y/A26T/E35D/A71D/L85Q, E35D/M47L, E23D/M42V/M43I/I58V/L70R, V68M/L70M/A71D/E95K, N55I/T57I/I69F, E35D/M43I/A71D, T41S/T57I/L70R, H18Y/A71D/L72P/E88V, V20I/A71D, E23G/A26S/E35D/T62N/A71D/L72V/L85M, A12T/E24D/E35D/D46V/I61V/L72P/E95V, V22L/E35D/M43L/A71G/D76H, E35G/K54E/A71D/L72P, L70Q/A71D, A26E/E35D/M47L/L85Q, D46E/A71D, Y31H/E35D/T41S/V68L/K93R/R94W, A26E/Q33R/E35D/M47L/L85Q/K86E, A26E/Q33R/E35D/M47L/L85Q, E35D/M47L/L85Q, A26E/Q33L/E35D/M47L/L85Q, A26E/Q33L/E35D/M47L, H18Y/A26E/Q33L/E35D/M47L/L85Q, Q33L/E35D/M47I, H18Y/Q33L/E35D/M47I, Q33L/E35D/D46E/M47I, Q33R/E35D/D46E/M47I, H18Y/E35D/M47L, Q33L/E35D/M47V, Q33L/E35D/M47V/T79A, Q33L/E35D/T41S/M47V, Q33L/E35D/M47I/L85Q, Q33L/E35D/M47I/T62N/L85Q, Q33L/E35D/M47V/L85Q, A26E/E35D/M43T/M47L/L85Q/R94Q, Q33R/E35D/K37E/M47V/L85Q, V22A/E23D/Q33L/E35D/M47V, E24D/Q33L/E35D/M47V/K54R/L85Q, S15P/Q33L/E35D/M47L/L85Q, E7D/E35D/M47I/L97Q, Q33L/E35D/T41S/M43I, E35D/M47I/K54R/L85E, Q33K/E35D/D46V/L85Q, Y31S/E35D/M47L/T79L/E88G, H18L/V22A/E35D/M47L/N48T/L85Q, Q27H/E35D/M47L/L85Q/R94Q/E95K, Q33K/E35D/M47V/K89E/K93R, E35D/M47I/E77A/L85Q/R94W, A26E/E35D/M43I/M47L/L85Q/K86E/R94W, Q27H/Q33L/E35D/M47V/N55D/L85Q/K89N, H18Y/V20A/Q33L/E35D/M47V/V53F, V22A/E35D/V68E/A71D, Q33L/E35D/M47L/A71G/F92S, V22A/R29H/E35D/D46E/M47I, Q33L/E35D/M43I/L85Q/R94W, H18Y/E35D/V68M/L97Q, Q33L/E35D/M47L/V68M/L85Q/E88D, Q33L/E35D/M43V/M47I/A71G, E35D/M47L/A71G/L97Q, E35D/M47V/A71G/L85M/L97Q, H18Y/Y31H/E35D/M47V/A71G/L85Q, E35D/D46E/M47V/L97Q, E35D/D46V/M47I/A71G/F92V, E35D/M47V/T62A/A71G/V83A/Y87H/L97M, Q33L/E35D/N48K/L85Q/L97Q, E35D/L85Q/K93T/E95V/L97Q, E35D/M47V/N48K/V68M/K89N, Q33L/E35D/M47I/N48D/A71G, R29H/E35D/M43V/M47I/I49V, Q27H/E35D/M47L/L85Q/D90G, E35D/M47L/L85Q/D90G, E35D/M47I/T62S/L85Q, A26E/E35D/M47L/A71G, E35D/M47I/Y87Q/K89E, V22A/E35D/M47I/Y87N, H18Y/A26E/E35D/M47L/L85Q/D90G, E35D/M47L/A71G/L85Q, E35D/M47V/A71G/E88D, E35D/A71G, E35D/M47V/A71G, I30V/E35D/M47V/A71G/A91V, I30V/V31C/E35D/M47V/A71G/L85M, V22D/E35D/M47L/L85Q, H18Y/E35D/N48K, E35D/T41S/M47V/A71G/K89N, E35D/M47V/N48T/L85Q, E35D/D46E/M47V/A71D/D90G, E35D/D46E/M47V/A71D, E35D/T41S/M43I/A71G/D90G, E35D/T41S/M43I/M47V/A71G, E35D/T41S/M43I/M47L/A71G, H18Y/Y22A/E35D/M47V/T62S/A71G, H18Y/A26E/E35D/M47L/V68M/A71G/D90G, E35D/K37E/M47V/N48D/L85Q/D90N, Q27H/E35D/D46V/M47L/A71G, V22L/Q27H/E35D/M47I/A71G, E35D/D46V/M47L/V68M/L85Q/E88D, E35D/T41S/M43V/M47I/L70M/A71G, E35D/D46E/M47V/N63D/L85Q, E35D/M47V/T62A/A71D/K93E, E35D/D46E/M47V/V68M/D90G/K93E, E35D/M43I/M47V/K89N, E35D/M47L/A71G/L85M/F92Y, E35D/M42V/M47V/E52D/L85Q, V22D/E35D/M47L/L70M/L97Q, E35D/T41S/M47V/L97Q, E35D/Y53H/A71G/D90G/L97R, E35D/A71D/L72V/R73H/E81K, Q33L/E35D/M43I/Y53F/T62S/L85Q, E35D/M38T/D46E/M47V/N48S, Q33R/E35D/M47V/N48K/L85M/F92L, E35D/M38T/M43V/M47V/N48R/L85Q, T28Y/Q33H/E35D/D46V/M47I/A71G, E35D/N48K/L72V, E35D/T41S/N48T, D46V/M47I/A71G, M47I/A71G, E35D/M43I/M47L/L85M, E35D/M43I/D46E/A71G/L85M, H18Y/E35D/M47L/A71G/A91S, E35D/M47I/N48K/I61F, E35D/M47V/T62S/L85Q, M43I/M47L/A71G, E35D/M47V, E35D/M47L/A71G/L85M, V22A/E35D/M47L/A71G, E35D/M47L/A71G, E35D/D46E/M47I, Q27H/E35D/M47I, E35D/D46E/L85M, E35D/D46E/A91G, E35D/D46E, E35D/L97R, H18Y/E35D, Q27L/E35D/M47V/I61V/L85M, E35D/M47V/I61V/L85M, E35D/M47V/L85M/R94Q, E35D/M47V/N48K/L85M, H18Y/E35D/M47V/N48K, A26E/Q27R/E35D/M47L/N48Y/L85Q, E35D/D46E/M47L/V68M/L85Q/F92L, E35D/M47I/T62S/L85Q/E88D, E24D/Q27R/E35D/T41S/M47V/L85Q, S15T/H18Y/E35D/M47V/T62A/N64S/A71G/L85Q/D90N, E35D/M47L/V68M/A71G/L85Q/D90G, H18Y/E35D/M47I/V68M/A71G/R94L, deltaE10-A98, Q33R/M47V/T62N/A71G, H18Y/Y22A/E35D/T41S/M47V/T62N/A71G/A91G, E35D/M47L/L70M, E35D/M47L/V68M, E35D/D46V/M47L/V68M/E88D, E35D/D46V/M47L/V68M/D90G, E35D/D46V/M47L/V68M/K89N, E35D/D46V/M47L/V68M/L85Q, E35D/D46V/M47L/V68M, E35D/D46V/M47L/V70M, E35D/D46V/M47L/V70M/L85Q, E35D/M47V/N48K/V68M, E24D/E35D/M47L/V68M/E95V/L97Q, E35D/D46E/M47I/T62A/V68M/L85M/Y87C, E35D/D46E/M47I/V68M/L85M, E35D/D46E/M47L/V68M/A71G/Y87C/K93R, E35D/D46E/M47L/V68M/T79M/L85M, E35D/D46E/M47L/V68M/T79M/L85M/L97Q, E35D/D46E/M47V/V68M/L85Q, E35D/M43I/M47L/V68M, E35D/M47I/V68M/Y87N, E35D/M47L/V68M/E95V/L97Q, E35D/M47L/Y53F/V68M/A71G/K93R/E95V, E35D/M47V/N48K/V68M/A71G/L85M, E35D/M47V/N48K/V68M/L85M, E35D/M47V/V68M/L85M, E35D/M47V/V68M/L85M/Y87D, E35D/T41S/D46E/M47I/V68M/K93R/E95V, H18Y/E35D/D46E/M47I/V68M/R94L, H18Y/E35D/M38I/M47L/V68M/L85M, H18Y/E35D/M47I/V68M/Y87N, H18Y/E35D/M47L/V68M/A71G/L85M, H18Y/E35D/M47L/V68M/E95V/L97Q, H18Y/E35D/M47L/Y53F/V68M/A71G, H18Y/E35D/M47L/Y53F/V68M/A71G/K93R/E95V, H18Y/E35D/M47V/V68M/L85M, H18Y/E35D/V68M/A71G/R94Q/E95V, H18Y/E35D/V68M/L85M/R94Q, H18Y/E35D/V68M/T79M/L85M, H18Y/Y22D/E35D/M47V/N48K/V68M, Q27L/Q33L/E35D/T41S/M47V/N48K/V68M/L85M, Q33L/E35D/M47V/T62S/V68M/L85M, Q33R/E35D/M38I/M47L/V68M, R29C/E35D/M47L/V68M/A71G/L85M, S21P/E35D/K37E/D46E/M47I/V68M, S21P/E35D/K37E/D46E/M47I/V68M/R94L, T13R/E35D/M47L/V68M, T13R/H18Y/E35D/V68M/L85M/R94Q, T13R/Q27L/Q33L/E35D/T41S/M47V/N48K/V68M/L85M, T13R/Q33L/E35D/M47L/V68M/L85M, T13R/Q33L/E35D/M47V/T62S/V68M/L85M, T13R/Q33R/E35D/M38I/M47L/V68M, T13R/Q33R/E35D/M38I/M47L/V68M/E95V/L97Q, T13R/Q33R/E35D/M38I/M47L/V68M/L85M, T13R/Q33R/E35D/M38I/M47L/V68M/L85M/R94Q, T13R/Q33R/E35D/M47L/V68M, T13R/Q33R/E35D/M47L/V68M/L85M, V22D/E24D/E35D/M47L/V68M, V22D/E24D/E35D/M47L/V68M/L85M/D90G, V22D/E24D/E35D/M47V/V68M, D46V, M47L, V68M, L85Q, E35D/D46V, E35D/V68M, E35D/L85Q, D46V/M47L, D46V/V68M, D46V/L85Q, M47L/V68M, M47L/L85Q, V68M/L85Q, E35D/D46V/M47L, E35D/D46V/V68M, E35D/D46V/L85Q, E35D/V68M/L85Q, D46V/M47L/V68M, D46V/M47L/L85Q, D46V/V68M/L85Q, M47L/V68M/L85Q, E35D/D46V/M47L/L85Q, E35D/D46V/V68M/L85Q, E35D/M47L/V68M/L85Q, D46V/M47L/V68M/L85Q, M47V, N48K, K89N, E35D/N48K, E35D/K89N, M47V/N48K, M47V/V68M, M47V/K89N, N48K/V68M, N48K/K89N, V68M/K89N, E35D/M47V/N48K, E35D/M47V/V68M, E35D/M47V/K89N, E35D/N48K/V68M, E35D/N48K/K89N, E35D/V68M/K89N, M47V/N48K/V68M, M47V/N48K/K89N, M47V/V68M/K89N, N48K/V68M/K89N, E35D/M47V/N48K/K89N, E35D/M47V/V68M/K89N, E35D/N48K/V68M/K89N, M47V/N48K/V68M/K89N, E35D/D46V/M47V/N48K/V68M, E35D/D46V/M47V/V68M/L85Q, E35D/D46V/M47V/V68M/K89N, E35D/M47V/N48K/V68M/L85Q, E35D/M47V/V68M/L85Q/K89N, A26E/E35D/M47L/V68M/A71G/D90G, H18Y/E35D/M47L/V68M/A71G/D90G, H18Y/A26E/M47L/V68M/A71G/D90G, H18Y/A26E/E35D/V68M/A71G/D90G, H18Y/A26E/E35D/M47L/A71G/D90G, H18Y/A26E/E35D/M47L/V68M/D90G, H18Y/A26E/E35D/M47L/V68M/A71G, E35D/M47L/V68M/A71G/D90G, H18Y/M47L/V68M/A71G/D90G, H18Y/A26E/V68M/A71G/D90G, H18Y/A26E/E35D/A71G/D90G, H18Y/A26E/E35D/M47L/D90G, H18Y/A26E/E35D/M47L/V68M, A26E/M47L/V68M/A71G/D90G, A26E/E35D/V68M/A71G/D90G, A26E/E35D/M47L/A71G/D90G, A26E/E35D/M47L/V68M/D90G, A26E/E35D/M47L/V68M/A71G, H18Y/E35D/V68M/A71G/D90G, H18Y/E35D/M47L/A71G/D90G, H18Y/E35D/M47L/V68M/D90G, H18Y/E35D/M47L/V68M/A71G, H18Y/A26E/M47L/A71G/D90G, H18Y/A26E/M47L/V68M/D90G, H18Y/A26E/M47L/V68M/A71G, H18Y/A26E/E35D/V68M/D90G, H18Y/A26E/E35D/V68M/A71G, H18Y/A26E/E35D/M47L/A71G, M47L/V68M/A71G/D90G, H18Y/V68M/A71G/D90G, H18Y/A26E/A71G/D90G, H18Y/A26E/E35D/D90G, H18Y/A26E/E35D/M47L, E35D/V68M/A71G/D90G, E35D/M47L/A71G/D90G, E35D/M47L/V68M/D90G, E35D/M47L/V68M/A71G, A26E/V68M/A71G/D90G, A26E/M47L/A71G/D90G, A26E/M47L/V68M/D90G, A26E/M47L/V68M/A71G, A26E/E35D/A71G/D90G, A26E/E35D/V68M/D90G, A26E/E35D/V68M/A71G, A26E/E35D/M47L/D90G, A26E/E35D/M47L/V68M, H18Y/M47L/A71G/D90G, H18Y/M47L/V68M/D90G, H18Y/M47L/V68M/A71G, H18Y/E35D/A71G/D90G, H18Y/E35D/V68M/D90G, H18Y/E35D/V68M/A71G, H18Y/E35D/M47L/D90G, H18Y/E35D/M47L/A71G, H18Y/E35D/M47L/V68M, H18Y/A26E/V68M/D90G, H18Y/A26E/V68M/A71G, H18Y/A26E/M47L/D90G, H18Y/A26E/M47L/A71G, H18Y/A26E/M47L/V68M, H18Y/A26E/E35D/A71G, H18Y/A26E/E35D/V68M, H18Y/E35D/M47V/V68M/A71G, H18C/A26P/E35D/M47L/V68M/A71G, H18I/A26P/E35D/M47V/V68M/A71G, H18L/A26N/D46E/V68M/A71G/D90G, H18L/E35D/M47V/V68M/A71G/D90G, H18T/A26N/E35D/M47L/V68M/A71G, H18V/A26K/E35D/M47L/V68M/A71G, H18V/A26N/E35D/M47V/V68M/A71G, H18V/A26P/E35D/M47V/V68L/A71G, H18V/A26P/E35D/M47L/V68M/A71G, H18V/E35D/M47V/V68M/A71G/D90G, H18Y/A26P/E35D/M47I/V68M/A71G, H18Y/A26P/E35D/M47V/V68M/A71G, H18Y/E35D/M47V/V68L/A71G/D90G, H18Y/E35D/M47V/V68M/A71G/D90G, A26P/E35D/M47I/V68M/A71G/D90G, H18V/A26G/E35D/M47V/V68M/A71G/D90G, H18V/A26S/E35D/M47L/V68M/A71G/D90G, H18V/A26R/E35D/M47L/V68M/A71G/D90G, H18V/A26D/E35D/M47V/V68M/A71G/D90G, H18V/A26Q/E35D/M47V/V68L/A71G/D90G, H18A/A26P/E35D/M47L/V68M/A71G/D90G, H18A/A26N/E35D/M47L/V68M/A71G/D90G, H18F/A26P/E35D/M47I/V68M/A71G/D90G, H18F/A26H/E35D/M47L/V68M/A71G/D90G, H18F/A26N/E35D/M47V/V68M/A71G/D90K, H18Y/A26N/E35D/M47F/V68M/A71G/D90G, H18Y/A26P/E35D/M47V/V68U/A71G/D90G, H18Y/A26Q/E35D/M47T/V68M/A71G/D90G, H18R/A26P/E35D/D46N/M47V/V68M/A71G/D90P, H18F/A26D/E35D/D46E/M47T/V68M/A71G/D90G.

[0302] In some embodiments, the variant CD80 polypeptide has one or more amino acid modifications (e.g., substitutions) in an unmodified CD80 or specific binding fragment there of corresponding to position(s) 7, 13, 15, 16, 20, 22, 23, 24, 25, 26, 27, 30, 31, 33, 34, 35, 36, 38, 41, 42, 43, 46, 47, 48, 51, 53, 54, 55, 57, 58, 61, 62, 65, 67, 68, 69, 70, 71, 72, 73, 74, 76, 77, 78, 79, 81, 82, 84, 85, 86, 87, 88, 92, 94, 95, and/or 97 with reference to numbering of SEQ ID NO: 2. In some embodiments, the variant CD80 polypeptide has one or more amino acid modifications (e.g., substitutions) in an unmodified CD80 or specific binding fragment there of corresponding to position(s) 7, 23, 26, 30, 34, 35, 46, 51, 55, 57, 58, 65, 71, 73, 78, 79, 82, or 84 with reference to numbering of SEQ ID NO: 2. In some embodiments, the variant CD80 polypeptide has a modification, e.g., amino acid substitution, at any 2 or more of the foregoing positions, such as 2, 3, 4, 5, 6, 7, 8, 9, 10, 11, 12, 13, 14, 15 or more of the positions.

[0303] In some embodiments, the variant CD80 polypeptide has one or more amino acid substitution selected from among E7D, T13A, T13R, S15P, S15T, C16R, H18A, H18C, H18F, H18I, H18T, H18V, V20A, V20I, V22D, V22I, V22L, E23D, E23G, E24D, L25S, A26D, A26E, A26G, A26H, A26K, A26N, A26P, A26Q, A26R, A26S, A26T, Q27H, Q27L, T28Y, I30F, I30T, I30V, Y31C, Y31S, Q33E, Q33K, Q33L, Q33R, K34E, E35D, E35G, K36R, T41S, M42I, M42V, M43L, M43T, D46E, D46N, D46V, M47F, M47I, M47L, M47V, M47Y, N48D, N48H, N48K, N48R, N48S, N48T, N48Y, P51A, Y53F, Y53H, K54E, K54N, K54R, N55D, N55I, T57A, T57I, I58V, I61F, I61V, T62A, T62N, N63D, L65P, I67L, I67V, V68E, V68I, V68L, I69F, L70M, L70P, L70Q, A71D, A71G, L72V, R73H, R73S, P74S, D76H, E77A, G78A, T79A, T79I, T79L, T79M, T79P, E81G, E81K, C82R, V84A, V84I, L85E, L85M, L85Q, K86M, Y87C, Y87D, Y87H, Y87Q, E88V, D90P, F92S, F92V, K93T, R94Q, R94W, E95D, E95V, L97M, and L97Q. In some embodiments, the variant CD80 polypeptide has one or more amino acid substitutions selected from E7D, E23D, E23G, A26E, A26P, A26S, A26T, I30F, I30T, I30V, K34E, E35D, E35G, D46E, D46V, P51A, N55D, N55I, T57A, T57I, I58V, L65P, A71D, A71G, R73S, G78A, T79A, T79I, T79L, T79P, C82R, V84A, V84I, L85Q, or a conservative amino acid substitution thereof. In some embodiments, the variant CD80 polypeptide comprises any one or more of the foregoing amino acid substitutions, such as 2, 3, 4, 5, 6, 7, 8, 9, 10, 11, 12, 13, 14, 15 or more of the amino acid substitutions. In some embodiments, the variant CD80 polypeptides comprises only one amino acid difference compared to the unmodified or wild-type CD80 polypeptide comprising only one of the foregoing amino acid substitutions.

[0304] In some embodiments, the variant CD80 polypeptide contains one or more additional amino acid modifications (e.g., substitutions) in an unmodified CD80 or specific binding fragment thereof corresponding to position(s) 12, 18, 29, 31, 37, 38, 41, 43, 44, 47, 61, 67, 68, 69, 70, 72, 77, 83, 88, 89, 90, 91, or 93 with reference to numbering of SEQ ID NO: 2. In some embodiments, the variant CD80 polypeptide has one or more additional amino acid substitution selected from among A12T, A12V, H18L, H18Y, R29H, Y31H, K37E, M38T, T41A, M43I, S44P, M47L, M47T, I67T, V68A, V68M, I69T, L70P, L70R, L70Q, L72P, E77G, V83A, V83I, E88D, K89E, K89N, D90G, D90N, A91T, K93R.

[0305] A conservative amino acid substitution is any amino acid that falls in the same class of amino acids as the substituted amino acids, other than the wild-type or unmodified amino acid. The classes of amino acids are aliphatic (glycine, alanine, valine, leucine, and isoleucine), hydroxyl or sulfur-containing (serine, cysteine, threonine, and methionine), cyclic (proline), aromatic (phenylalanine, tyrosine, tryptophan), basic (histidine, lysine, and arginine), and acidic/amide (aspartate, glutamate, asparagine, and glutamine). Thus, for example, a conservative amino acid substitution of the A26E substitution includes A26D, A26N, and A26Q amino acid substitutions.

[0306] In some embodiments, the variant CD80 polypeptide has one or more amino acid substitution selected from among L70Q, K89R, D90G, D90K, A91G, F92Y, K93R, I118V, T120S or T130A, with reference to numbering set forth in SEQ ID NO:2, or a conservative amino acid substitution thereof. In some embodiments, the variant CD80 polypeptide as two or more amino acids substitutions from among L70Q, K89R, D90G, D90K, A91G, F92Y, K93R, I118V, T120S or T130A, with reference to numbering set forth in SEQ ID NO:2, or a conservative amino acid substitution thereof. In some embodiments, the variant CD80 polypeptide as three or more amino acids substitutions from among L70Q, K89R, D90G, D90K, A91G, F92Y, K93R, I118V, T120S or T130A, with reference to numbering set forth in SEQ ID NO:2, or a conservative amino acid substitution thereof.

[0307] In some embodiments, the variant CD80 polypeptide has or comprises the amino acid substitutions L70Q/K89R, L70Q/D90G, L70Q/D90K, L70Q/A91G, L70Q/F92Y, L70Q/K93R, L70Q/I118V, L70Q/T120S, L70Q/T130A, K89R/D90G, K89R/D90K, K89R/A91G, K89R/F92Y, K89R/K93R, K89R/I118V, K89R/T120S, K89R/T130A, D90G/A91G, D90G/F92Y, D90G/K93R, D90G/I118V, D90G/T120S, D90G/T130A, D90K/A91G, D90K/F92Y, D90K/K93R, D90K/I118V, D90K/T120S, D90K/T130A, F92Y/K93R, F92Y/I118V, F92Y/T120S, F92Y/T130A, K93R/I118V, K93R/T120S, K93R/T130A, I118V/T120S, I118V/T130A or T120S/T130A.

[0308] In some embodiments, the variant CD80 polypeptide has or comprises the amino acid substitutions A91G/I118V/T120S/T130A.

[0309] In some embodiments, the variant CD80 polypeptide has or comprises the amino acid substitutions S21P/L70Q/D90G/I118V/T120S/T7130A.

[0310] In some embodiments, the variant CD80 polypeptide has or comprises the amino acid substitutions E88D/K89R/D90K/A91G/F92Y/K93R.

[0311] In some embodiments, the variant CD80 polypeptide has or comprises the amino acid substitutions I67T/L70Q/A91G/I118V/T120S/T130A.

[0312] In some embodiments, the variant CD80 polypeptide comprises an amino acid modification in an unmodified CD80 or specific binding fragment thereof at a position corresponding to position 18, with reference to numbering of positions set forth in SEQ ID NO:2. In some embodiments, the amino acid modification is the amino acid substitution H18Y or a conservative amino acid substitution thereof. In some embodiments, the variant CD80 polypeptide further contains one or more amino acid modifications, e.g. amino acid substitutions, at one or more positions 26, 35, 46, 47, 68, 71, 85 or 90. In some embodiments, the one or more amino acid modification is one or more amino acid substitutions A26E, E35D, D46E, D46V, M47I, M47L, V68M, A71G, L85Q or D90G, or a conservative amino acid substitution thereof. In some embodiments, the variant CD80 polypeptide comprises the amino acid modifications H18Y/A26E, H18Y/E35D, H18Y/D46E, H18Y/D46V, H18Y/M47I, H18Y/M47L, H18Y/V68M, H18Y/A71G, H18Y/L85Q, H18Y/D90G. The variant CD80 polypeptide can provide further amino acid modifications in accord with the provided embodiments. Table 2 sets forth exemplary amino acid modifications and variant CD80 polypeptides as described.

[0313] In some embodiments, the variant CD80 polypeptide comprises an amino acid modification in an unmodified CD80 or specific binding fragment thereof at a position corresponding to position 26, with reference to numbering of positions set forth in SEQ ID NO:2. In some embodiments, the amino acid modification is the amino acid substitution A26E or a conservative amino acid substitution thereof. In some embodiments, the variant CD80 polypeptide further contains one or more amino acid modifications, e.g. amino acid substitutions, at one or more positions 18, 35, 46, 47, 68, 71, 85 or 90. In some embodiments, the one or more amino acid modification is one or more amino acid substitutions H18Y, E35D, D46E, D46V, M47I, M47L, V68M, A71G, L85Q or D90G, or a conservative amino acid substitution thereof. In some embodiments, the variant CD80 polypeptide comprises the amino acid modifications H18Y/A26E, A26E/E35D, A26E/D46E, A26E/D46V, A26E/M47I, A26E/M47L, A26E/V68M, A26E/A71G, A26E/L85Q, A26E/D90G. The variant CD80 polypeptide can include further amino acid modifications, such as any described herein, in accord with provided embodiments. Table 2 sets forth exemplary amino acid modifications and variant CD80 polypeptides as described.

[0314] In some embodiments, the variant CD80 polypeptide comprises an amino acid modification in an unmodified CD80 or specific binding fragment thereof at a position corresponding to position 35, with reference to numbering of positions set forth in SEQ ID NO:2. In some embodiments, the amino acid modification is the amino acid substitution E35D or a conservative amino acid substitution thereof. In some embodiments, the variant CD80 polypeptide further contains one or more amino acid modifications, e.g. amino acid substitutions, at one or more positions 18, 26, 46, 47, 68, 71, 85 or 90. In some embodiments, the one or more amino acid modification is one or more amino acid substitutions H18Y, A26E, D46E, D46V, M47I, M47L, V68M, A71G, L85Q or D90G, or a conservative amino acid substitution thereof. In some embodiments, the variant CD80 polypeptide comprises the amino acid modifications H18Y/E35D, A26E/E35D, E35D/D46E, E35D/D46V, E35D/M47I, E35D/M47L, E35D/V68M, E35D/A71G, E35D/L85Q, E35D/D90G. The variant CD80 polypeptide can include further amino acid modifications, such as any described herein, in accord with provided embodiments. Table 2 sets forth exemplary amino acid modifications and variant CD80 polypeptides as described. In some embodiments, the variant CD80 polypeptide comprises an amino acid modification in an unmodified CD80 or specific binding fragment thereof at a position corresponding to position 46, with reference to numbering of positions set forth in SEQ ID NO:2. In some embodiments, the amino acid modification is the amino acid substitution D46E or D46V or a conservative amino acid substitution thereof. In some embodiments, the variant CD80 polypeptide further contains one or more amino acid modifications, e.g. amino acid substitutions, at one or more positions 18, 26, 35, 47, 68, 71, 85 or 90. In some embodiments, the one or more amino acid modification is one or more amino acid substitutions H18Y, A26E, E35D, M47I, M47L, V68M, A71G, L85Q or D90G, or a conservative amino acid substitution thereof. In some embodiments, the variant CD80 polypeptide comprises the amino acid modifications H18Y/D46E, A26E/D46E, E35D/D46E, D46E/M47I, D46E/M47L, D46E/V68M, D46E/A71G, D46E/L85Q, D46E/D90G. In some embodiments, the variant CD80 polypeptide comprises the amino acid modifications H18Y/D46V, A26E/D46V, E35D/D46V, D46V/M47I, D46V/M47L, D46V/V68M, D46V/A71G, D46V/L85Q, D46V/D90G. The variant CD80 polypeptide can include further amino acid modifications, such as any described herein, in accord with provided embodiments. Table 2 sets forth exemplary amino acid modifications and variant CD80 polypeptides as described.

[0315] In some embodiments, the variant CD80 polypeptide comprises an amino acid modification in an unmodified CD80 or specific binding fragment thereof at a position corresponding to position 47, with reference to numbering of positions set forth in SEQ ID NO:2. In some embodiments, the amino acid modification is the amino acid substitution M47I or M47L or a conservative amino acid substitution thereof. In some embodiments, the variant CD80 polypeptide further contains one or more amino acid modifications, e.g. amino acid substitutions, at one or more positions 18, 26, 35, 46, 68, 71, 85 or 90. In some embodiments, the one or more amino acid modification is one or more amino acid substitutions H18Y, A26E, E35D, D46E, D46V, V68M, A71G, L85Q or D90G, or a conservative amino acid substitution thereof. In some embodiments, the variant CD80 polypeptide comprises the amino acid modifications H18Y/M47I, A26E/M47I, E35D/M47I, M47I/D46E, M47I/D46V, M47I/V68M, M47I/A71G, M47I/L85Q or M47I/D90G. In some embodiments, the variant CD80 polypeptide comprises the amino acid modifications H18Y/M47L, A26E/M47L, E35D/M47L, M47L/D46E, M47L/D46V, M47L/V68M, M47L/A71G, M47L/L85Q, or M47L/D90G. The variant CD80 polypeptide can include further amino acid modifications, such as any described herein, in accord with provided embodiments. Table 2 sets forth exemplary amino acid modifications and variant CD80 polypeptides as described.

[0316] In some embodiments, the variant CD80 polypeptide comprises an amino acid modification in an unmodified CD80 or specific binding fragment thereof at a position corresponding to position 68, with reference to numbering of positions set forth in SEQ ID NO:2. In some embodiments, the amino acid modification is the amino acid substitution V68M or a conservative amino acid substitution thereof. In some embodiments, the variant CD80 polypeptide further contains one or more amino acid modifications, e.g. amino acid substitutions, at one or more positions 18, 26, 35, 46, 47, 71, 85 or 90. In some embodiments, the one or more amino acid modification is one or more amino acid substitutions H18Y, A26E, E35D, D46E, D46V, M47I, M47L, A71G, L85Q or D90G, or a conservative amino acid substitution thereof. In some embodiments, the variant CD80 polypeptide comprises the amino acid modifications H18Y/V68M, A26E/V68M, E35D/V68M, D46E/V68M, D46V/D68M, M47I/V68M, M47L/V68M, V68M/A71G, V68M/L85Q, V68M/D90G. The variant CD80 polypeptide can include further amino acid modifications, such as any described herein, in accord with provided embodiments. Table 2 sets forth exemplary amino acid modifications and variant CD80 polypeptides as described.

[0317] In some embodiments, the variant CD80 polypeptide comprises an amino acid modification in an unmodified CD80 or specific binding fragment thereof at a position corresponding to position 71, with reference to numbering of positions set forth in SEQ ID NO:2. In some embodiments, the amino acid modification is the amino acid substitution A71G or a conservative amino acid substitution thereof. In some embodiments, the variant CD80 polypeptide further contains one or more amino acid modifications, e.g. amino acid substitutions, at one or more positions 18, 26, 35, 46, 47, 68, 85 or 90. In some embodiments, the one or more amino acid modification is one or more amino acid substitutions H18Y, A26E, E35D, D46E, D46V, M47I, M47L, V68M, L85Q or D90G, or a conservative amino acid substitution thereof. In some embodiments, the variant CD80 polypeptide comprises the amino acid modifications H18Y/A71G, A26E/A71G, E35D/A71G, D46E/A71G, D46V/D68M, M47I/A71G, M47L/A71G, V68M/A71G, A71G/L85Q, A71G/D90G. The variant CD80 polypeptide can include further amino acid modifications, such as any described herein, in accord with provided embodiments. Table 2 sets forth exemplary amino acid modifications and variant CD80 polypeptides as described.

[0318] In some embodiments, the variant CD80 polypeptide comprises an amino acid modification in an unmodified CD80 or specific binding fragment thereof at a position corresponding to position 85, with reference to numbering of positions set forth in SEQ ID NO:2. In some embodiments, the amino acid modification is the amino acid substitution L85Q or a conservative amino acid substitution thereof. In some embodiments, the variant CD80 polypeptide further contains one or more amino acid modifications, e.g. amino acid substitutions, at one or more positions 18, 26, 35, 46, 47, 68, 71, or 90. In some embodiments, the one or more amino acid modification is one or more amino acid substitutions H18Y, A26E, E35D, D46E, D46V, M47I, M47L, V68M, A71G or D90G, or a conservative amino acid substitution thereof. In some embodiments, the variant CD80 polypeptide comprises the amino acid modifications H18Y/L85Q, A26E/L85Q, E35D/L85Q, D46E/L85Q, D46V/D68M, M47I/L85Q, M47L/L85Q, V68M/L85Q, A71G/L85Q, L85Q/D90G. The variant CD80 polypeptide can include further amino acid modifications, such as any described herein, in accord with provided embodiments. Table 2 sets forth exemplary amino acid modifications and variant CD80 polypeptides as described.

[0319] In some embodiments, the variant CD80 polypeptide comprises an amino acid modification in an unmodified CD80 or specific binding fragment thereof at a position corresponding to position 90, with reference to numbering of positions set forth in SEQ ID NO:2. In some embodiments, the amino acid modification is the amino acid substitution D90G or a conservative amino acid substitution thereof. In some embodiments, the variant CD80 polypeptide further contains one or more amino acid modifications, e.g. amino acid substitutions, at one or more positions 18, 26, 35, 46, 47, 68, 71, or 85. In some embodiments, the one or more amino acid modification is one or more amino acid substitutions H18Y, A26E, E35D, D46E, D46V, M47I, M47L, V68M, A71G or L85Q, or a conservative amino acid substitution thereof. In some embodiments, the variant CD80 polypeptide comprises the amino acid modifications H18Y/D90G, A26E/D90G, E35D/D90G, D46E/D90G, D46V/D68M, M47I/D90G, M47L/D90G, V68M/D90G, A71G/D90G, L85Q/D90G. The variant CD80 polypeptide can include further amino acid modifications, such as any described herein, in accord with provided embodiments. Table 2 sets forth exemplary amino acid modifications and variant CD80 polypeptides as described.

[0320] In some embodiments, the variant CD80 polypeptide comprises an amino acid modification in an unmodified CD80 or specific binding fragment thereof at a position corresponding to position 18, 26, 35, 46, 47, 48, 68, 70, 71, 85, 88, 89, 90, or 93 with reference to numbering of positions set forth in SEQ ID NO:2. In some embodiments, the amino acid modification is the amino acid substitution H18Y, A26E, E35D, D46E, D46V, M47I, M47L, M47V, N48K, V68M, L70M, A71G, L85Q, E88D, K89N, D90G, K93E or a conservative amino acid substitution thereof. In some embodiments, the variant CD80 polypeptide comprises the amino acid modifications E35D/M47I/L70M, E35D/M47L E35D/M47V/N48K/V68M/K89N, H18Y/A26E/E35D/M47L/V68M/A71G/D90G, E35D/D46E/M47V/V68M/D90G/K93E, or E35D/D46V/M47L/V68M/L85Q/E88D.

[0321] In some embodiments, the variant CD80 polypeptide does not contain amino acid modifications in an unmodified CD80 polypeptide set forth in SEQ ID NO:2, 76 or 150 in which the only amino acid modifications are H18Y/M47I/T57I/A71G, H18Y/A26T/E35D/A71D/L85Q or H18Y/A71D/L72P/E88V. In some embodiments, the variant CD80 polypeptide is not the polypeptide set forth in SEQ ID NO: 41, 59, 66, 115, 133, 140, 189, 207 or 214.

[0322] In some embodiments, the variant CD80 polypeptide does not contain amino acid modifications in an unmodified CD80 polypeptide set forth in SEQ ID NO:2, 76 or 150 in which the only amino acid modifications are A26E/E35D/M47L/L85Q. In some embodiments, the variant CD80 polypeptide is not the polypeptide set forth in SEQ ID NO: 73, 147, or 221.

[0323] In some embodiments, the variant CD80 polypeptide does not contain amino acid modifications in an unmodified CD80 polypeptide set forth in SEQ ID NO:2, 76 or 150 in which the only amino acid modifications are E35D/M47I/L65P/D90N, L25S/E35D/M47I/D90N, E35D/A71D, E35D/M47I, E35D/T57I/L70Q/A71D, E35D/A71D, E35D/I67L/A71D. E35D, E35D/M47I/L70M, E35D/A71D/L72V, E35D/M43L/L70M, A26P/E35D/M43I/L85Q/E88D, E35D/D46V/L85Q, Q27L/E35D/M47/T57I/L70Q/E88D, E35D/T57A/A71D/L85Q, H18Y/A26T/E35D/A71D/L85Q, E35D/M47L, E35D/M43I/A71D, E23G/A26S/E35D/T62N/A71D/L72V/L85M, A12T/E24D/E35D/D46V/I61V/L72P/E95V, V22L/E35D/M43L/A71G/D76H, A26E/E35D/M47L/L85Q, Y31H/E35D/T41S/V68L/K93R/R94W. In some embodiments, the variant CD80 polypeptide is not the polypeptide set forth in SEQ ID NO: 19, 20, 28, 29, 37, 46, 47, 50, 51, 52, 53, 54, 55, 56, 58, 59, 60, 64, 68, 69, 70, 73, 75, 93, 94, 102, 103, 111, 120, 121, 124, 125, 126, 127, 128, 129, 130, 132, 133, 134, 138, 142, 143, 144, 147, 149, 167, 168, 176, 177, 185, 194, 195, 198, 199, 200, 201, 202, 203, 204, 206, 207, 208, 212, 216, 217, 218, 221, or 223.

[0324] In some embodiments, the variant CD80 polypeptide does not contain amino acid modifications in an unmodified CD80 polypeptide set forth in SEQ ID NO:2, 76 or 150 in which the only amino acid modifications are E35D/D46V/L85Q, A12T/E24D/E35D/D46V/I61V/L72P/E95V or D46E/A71D. In some embodiments, the variant CD80 polypeptide is not the polypeptide set forth in SEQ ID NO: 55, 69, 74, 129, 143, 148, 203, 217, or 222.

[0325] In some embodiments, the variant CD80 polypeptide does not contain amino acid modifications in an unmodified CD80 polypeptide set forth in SEQ ID NO:2, 76 or 150 in which the only amino acid modifications are E35D/M47I/L65P/D90N, L25S/E35D/M47I/D90N, E35D/M47I, M47L/V68A, M47I/E88D, H18Y/M47/T57I/A71G, T13R/M42V/M47I/A71D, E35D/M47I/L70M, Q27L/E35D/M47I/T57I/L70Q/E88D, E35D/M47L, A26E/E35D/M47L/L85Q. In some embodiments, the variant CD80 polypeptide is not the polypeptide set forth in SEQ ID NO: 19, 20, 29, 33, 38, 41, 49, 51, 56, 60, 73, 93, 94, 103, 107, 112, 115, 123, 125, 130, 134, 147, 167, 168, 177, 181, 186, 189, 197, 199, 204, 208, 221.

[0326] In some embodiments, the variant CD80 polypeptide does not contain amino acid modifications in an unmodified CD80 polypeptide set forth in SEQ ID NO:2, 76 or 150 in which the only amino acid modifications are A26E/E35D/M47L/L85Q. In some embodiments, the variant CD80 polypeptide is not the polypeptide set forth in SEQ ID NO: 62, 136, 210.

[0327] In some embodiments, the variant CD80 polypeptide does not contain amino acid modifications in an unmodified CD80 polypeptide set forth in SEQ ID NO:2, 76 or 150 in which the only amino acid modifications are H18Y/M47I/T57I/A71G or V22L/E35D/M43L/A71G/D76H. In some embodiments, the variant CD80 polypeptide is not the polypeptide set forth in SEQ ID NO: 41, 70, 115, 144, 189 or 218.

[0328] In some embodiments, the variant CD80 polypeptide does not contain amino acid modifications in an unmodified CD80 polypeptide set forth in SEQ ID NO:2, 76 or 150 in which the only amino acid modifications are A26P/E35D/M43I/L85Q/E88D, E35D/D46V/L85Q, E35D/T57A/A71D/L85Q, H18Y/A26T/E35D/A71D/L85Q or A26E/E35D/M47L/L85Q. In some embodiments, the variant CD80 polypeptide is not the polypeptide set forth in SEQ ID NO: 54, 55, 58, 59, 73, 128, 129, 132, 133, 147, 202, 203, 206, 207 or 221.

[0329] In some embodiments, the variant CD80 polypeptide comprises amino acid modifications in an unmodified CD80 or specific binding fragment thereof at a position corresponding to E35D and M47L. In some embodiments, the variant CD80 polypeptide comprises amino acid modifications in an unmodified CD80 or specific binding fragment thereof corresponding to E35D and M47I. In some embodiments, the variant CD80 polypeptide comprises amino acid modifications in an unmodified CD80 or specific binding fragment thereof corresponding to E35D and A71G. In some embodiments, the variant CD80 polypeptide comprises amino acid modifications in an unmodified CD80 or specific binding fragment thereof corresponding to E35D and M47V. In some embodiments, the variant CD80 polypeptide comprises amino acid modifications in an unmodified CD80 or specific binding fragment thereof corresponding to E35D and V68M. In some embodiments, the variant CD80 polypeptide comprises amino acid modifications in an unmodified CD80 or specific binding fragment thereof corresponding to H18Y and E35D.

[0330] In some embodiments, the variant CD80 polypeptide comprises at least three amino acid modifications, wherein the at least three modifications include a modification at three or more of positions corresponding to positions 18, 26, 35, 46, 47, 68, 71, 85 or 90, with reference to numbering of positions set forth in SEQ ID NO:2. In some embodiments, the at least three amino acid modification comprises amino acid modifications in an unmodified CD80 or specific binding fragment thereof corresponding to H18Y, A26E, E35D, D46E, D46V, M47I, M47L, V68M, A71G, L85Q, or D90G or a conservative amino acid substitution thereof.

[0331] In some embodiments, the variant CD80 polypeptide comprises amino acid modifications in an unmodified CD80 or specific binding fragment thereof corresponding to E35D/M47L/V68M.

[0332] In some embodiments, the variant CD80 polypeptide comprises amino acid modifications in an unmodified CD80 or specific binding fragment thereof corresponding to E35D/M47V/V68M.

[0333] In some embodiments, the variant CD80 polypeptide comprises amino acid modifications in an unmodified CD80 or specific binding fragment thereof corresponding to E35D/M47L/L85Q.

[0334] In some embodiments, the variant CD80 polypeptide comprises amino acid modifications in an unmodified CD80 or specific binding fragment thereof corresponding to H18Y/E35D/M47I.

[0335] In some embodiments, the variant CD80 polypeptide comprises any of the substitutions (mutations) listed in Table 2. Table 2 also provides exemplary sequences by reference to SEQ ID NO for the extracellular domain (ECD) or IgV domain of wild-type CD80 or exemplary variant CD80 polypeptides. As indicated, the exact locus or residues corresponding to a given domain can vary, such as depending on the methods used to identify or classify the domain. Also, in some cases, adjacent N- and/or C-terminal amino acids of a given domain (e.g., IgV) also can be included in a sequence of a variant IgSF polypeptide, such as to ensure proper folding of the domain when expressed. Thus, it is understood that the exemplification of the SEQ ID NOs in Table 2 is not to be construed as limiting. For example, the particular domain, such as the IgV domain, of a variant CD80 polypeptide can be several amino acids longer or shorter, such as 1-10, e.g., 1, 2, 3, 4, 5, 6 or 7 amino acids longer or shorter, than the sequence of amino acids set forth in the respective SEQ ID NO.

[0336] In some embodiments, the variant CD80 polypeptide comprises any of the extracellular domain (ECD) sequences listed in Table 2 (i.e., any one of SEQ ID NOS: 3-75, 224-319, 512-722, 1145-1175, 1299-1365, 1383-1444, 1447-1500, 1537 or 1541). In some embodiments, the variant CD80 polypeptide comprises a polypeptide sequence that exhibits at least 90% identity, at least 91% identity, at least 92% identity, at least 93% identity, at least 94% identity, at least 95% identity, such as at least 96% identity, 97% identity, 98% identity, or 99% identity to any of the extracellular domain (ECD) sequences listed in Table 2 (i.e., any one of SEQ ID NOS: 3-75, 224-319, 512-722, 1145-1175, 1299-1365, 1383-1444, 1447-1500, 1537 or 1541) and contains the amino acid modification(s), e.g., substitution(s), not present in the wild-type or unmodified CD80. In some embodiments, the variant CD80 polypeptide comprises a specific binding fragment of any of the extracellular domain (ECD) sequences listed in Table 2 (i.e., any one of SEQ ID NOS: 3-75, 224-319, 512-722, 1145-1175, 1299-1365, 1383-1444, 1447-1500, 1537 or 1541) and contains the amino acid modification(s), e.g., substitution(s), not present in the wild-type or unmodified CD80. In some embodiments, the variant CD80 polypeptide comprises any of the IgV sequences listed in Table 2 (i.e., any one of SEQ ID NOS: 77-149, 151-223, 320-511, 723-1144, 1176-1237, 1256-1298, 1366-1368, 1370-1380, 1381-1382, 1445-1446, 1538, 1540, 1542 or 1544). In some embodiments, the variant CD80 polypeptide comprises a polypeptide sequence that exhibits at least 90% identity, at least 91% identity, at least 92% identity, at least 93% identity, at least 94% identity, at least 95% identity, such as at least 96% identity, 97% identity, 98% identity, or 99% identity to any of the IgV sequences listed in Table 2 (i.e., any one of SEQ ID NOS: 77-149, 151-223, 320-511, 723-1144, 1176-1237, 1256-1298,1366-1368, 1370-1380, 1381-1382, 1445-1446, 1538, 1540, 1542 or 1544) and contains the amino acid modification(s), e.g., substitution(s), not present in the wild-type or unmodified CD80. In some embodiments, the variant CD80 polypeptide comprises a specific binding fragment of any of the IgV sequences listed in Table 2 (i.e., any one of SEQ ID NOS: 77-149, 151-223, 320-511, 723-1144, 1176-1237, 1256-1298,1366-1368, 1370-1380, 1381-1382, 1445-1446, 1538, 1540, 1542 or 1544) and contains the amino acid modification(s), e.g., substitution(s), not present in the wild-type or unmodified CD80.

[0337] Table 2 also provides exemplary sequences by reference to SEQ ID NO for the extracellular domain (ECD) or IgV domain of wild-type CD80 or exemplary variant CD80 polypeptides. As indicated, the exact locus or residues corresponding to a given domain can vary, such as depending on the methods used to identify or classify the domain. Also, in some cases, adjacent N- and/or C-terminal amino acids of a given domain (e.g., ECD) also can be included in a sequence of a variant IgSF polypeptide, such as to ensure proper folding of the domain when expressed. Thus, it is understood that the exemplification of the SEQ ID NOS in Table 2 is not to be construed as limiting. For example, the particular domain, such as the IgV domain, of a variant CD80 polypeptide can be several amino acids longer or shorter, such as 1-10, e.g., 1, 2, 3, 4, 5, 6 or 7, amino acids longer or shorter, than the sequence of amino acids set forth in the respective SEQ ID NO.

TABLE 2
Exemplary variant CD80 polypeptides

| | ECD | IgV | |
|---|---|---|---|
| | SEQ | SEQ | |
| | ID | ID | |
| CD80 Mutation(s) | NO | NO | |
| Wild-type | 2 | 76 | 150 |
| L70P | 3 | 77 | 151 |
| I30F/L70P | 4 | 78 | 152 |
| Q27H/T41S/A71D | 5 | 79 | 153 |
| I30T/L70R | 6 | 80 | 154 |
| T13R/C16R/L70Q/A71D | 7 | 81 | 155 |
| T57I | 8 | 82 | 156 |
| M43I/C82R | 9 | 83 | 157 |
| V22L/M38V/M47T/A71D/L85M | 10 | 84 | 158 |
| I30V/T57I/L70P/A71D/A91T | 11 | 85 | 159 |
| V22I/L70M/A71D | 12 | 86 | 160 |
| N55D/L70P/E77G | 13 | 87 | 161 |
| T57A/I69T | 14 | 88 | 162 |
| N55D/K86M | 15 | 89 | 163 |
| L72P/T79I | 16 | 90 | 164 |
| L70P/F92S | 17 | 91 | 165 |
| T79P | 18 | 92 | 166 |
| E35D/M47I/L65P/D90N | 19 | 93 | 167 |
| L25S/E35D/M47I/D90N | 20 | 94 | 168 |
| A71D | 22 | 96 | 170 |
| T13A/I61N/A71D | 23 | 97 | 171 |
| E81K/A91S | 24 | 98 | 172 |
| A12V/M47V/L70M | 25 | 99 | 173 |
| K34E/T41A/L72V | 26 | 100 | 174 |
| T41S/A71D/V84A | 27 | 101 | 175 |
| E35D/A71D | 28 | 102 | 176 |
| E35D/M47I | 29 | 103 | 177 |
| K36R/G78A | 30 | 104 | 178 |
| Q33E/T41A | 31 | 105 | 179 |
| M47V/N48H | 32 | 106 | 180 |
| M47L/V68A | 33 | 107 | 181 |
| S44P/A71D | 34 | 108 | 182 |
| Q27H/M43I/A71D/R73S | 35 | 109 | 183 |
| E35D/T57I/L70Q/A71D | 37 | 111 | 185 |
| M47I/E88D | 38 | 112 | 186 |
| M42I/I61V/A71D | 39 | 113 | 187 |
| P51A/A71D | 40 | 114 | 188 |
| H18Y/M47I/T57I/A71G | 41 | 115 | 189 |
| V20I/M47V/T57I/V84I | 42 | 116 | 190 |
| V20I/M47V/A71D | 43 | 117 | 191 |
| A71D/L72V/E95K | 44 | 118 | 192 |
| V22L/E35G/A71D/L72P | 45 | 119 | 193 |
| E35D/A71D | 46 | 120 | 194 |
| E35D/I67L/A71D | 47 | 121 | 195 |
| Q27H/E35G/A71D/L72P/T79I | 48 | 122 | 196 |
| T13R/M42V/M47I/A71D | 49 | 123 | 197 |
| E35D | 50 | 124 | 198 |
| E35D/M47I/L70M | 51 | 125 | 199 |
| E35D/A71D/L72V | 52 | 126 | 200 |
| E35D/M43L/L70M | 53 | 127 | 201 |
| A26P/E35D/M43I/L85Q/E88D | 54 | 128 | 202 |
| E35D/D46V/L85Q | 55 | 129 | 203 |
| Q27L/E35D/M47I/T57I/L70Q/E88D | 56 | 130 | 204 |
| M47V/I69F/A71D/V83I | 57 | 131 | 205 |
| E35D/T57A/A71D/L85Q | 58 | 132 | 206 |
| H18Y/A26T/E35D/A71D/L85Q | 59 | 133 | 207 |
| E35D/M47L | 60 | 134 | 208 |
| E23D/M42V/M43I/I58V/L70R | 61 | 135 | 209 |
| V68M/L70M/A71D/E95K | 62 | 136 | 210 |
| N55I/T57I/I69F | 63 | 137 | 211 |
| E35D/M43I/A71D | 64 | 138 | 212 |
| T41S/T57I/L70R | 65 | 139 | 213 |
| H18Y/A71D/L72P/E88V | 66 | 140 | 214 |
| V20I/A71D | 67 | 141 | 215 |
| E23G/A26S/E35D/T62N/A71D/L72V/L85M | 68 | 142 | 216 |
| A12T/E24D/E35D/D46V/I61V/L72P/E95V | 69 | 143 | 217 |
| V22L/E35D/M43L/A71G/D76H | 70 | 144 | 218 |
| E35G/K54E/A71D/L72P | 71 | 145 | 219 |
| L70Q/A71D | 72 | 146 | 220 |
| A26E/E35D/M47L/L85Q | 73 | 147 | 221 |
| D46E/A71D | 74 | 148 | 222 |
| Y31H/E35D/T41S/V68L/K93R/R94W | 75 | 149 | 223 |
| A26E/Q33R/E35D/M47L/L85Q/K86E | 224 | 320 | 416 |
| A26E/Q33R/E35D/M47L/L85Q | 225 | 321 | 417 |
| E35D/M47L/L85Q | 226 | 322 | 418 |
| A26E/Q33L/E35D/M47L/L85Q | 227 | 323 | 419 |
| A26E/Q33L/E35D/M47L | 228 | 324 | 420 |
| H18Y/A26E/Q33L/E35D/M47L/L85Q | 229 | 325 | 421 |
| Q33L/E35D/M47I | 230 | 326 | 422 |
| H18Y/Q33L/E35D/M47I | 231 | 327 | 423 |
| Q33L/E35D/D46E/M47I | 232 | 328 | 424 |
| Q33R/E35D/D46E/M47I | 233 | 329 | 425 |
| H18Y/E35D/M47L | 234 | 330 | 426 |
| Q33L/E35D/M47V | 235 | 331 | 427 |
| Q33L/E35D/M47V/T79A | 236 | 332 | 428 |
| Q33L/E35D/T41S/M47V | 237 | 333 | 429 |
| Q33L/E35D/M47I/L85Q | 238 | 334 | 430 |
| Q33L/E35D/M47I/T62N/L85Q | 239 | 335 | 431 |
| Q33L/E35D/M47V/L85Q | 240 | 336 | 432 |
| A26E/E35D/M43T/M47L/L85Q/R94Q | 241 | 337 | 433 |
| Q33R/E35D/K37E/M47V/L85Q | 242 | 338 | 434 |
| V22A/E23D/Q33L/E35D/M47V | 243 | 339 | 435 |
| E24D/Q33L/E35D/M47V/K54R/L85Q | 244 | 340 | 436 |
| S15P/Q33L/E35D/M47L/L85Q | 245 | 341 | 437 |
| E7D/E35D/M47I/L97Q | 246 | 342 | 438 |
| Q33L/E35D/T41S/M43I | 247 | 343 | 439 |
| E35D/M47I/K54R/L85E | 248 | 344 | 440 |
| Q33K/E35D/D46V/L85Q | 249 | 345 | 441 |
| Y31S/E35D/M47L/T79L/E88G | 250 | 346 | 442 |
| H18L/V22A/E35D/M47L/N48T/L85Q | 251 | 347 | 443 |
| Q27H/E35D/M47L/L85Q/R94Q/E95K | 252 | 348 | 444 |
| Q33K/E35D/M47V/K89E/K93R | 253 | 349 | 445 |
| E35D/M47I/E77A/L85Q/R94W | 254 | 350 | 446 |
| A26E/E35D/M43I/M47L/L85Q/K86E/R94W | 255 | 351 | 447 |
| Q27H/Q33L/E35D/M47V/N55D/L85Q/K89N | 256 | 352 | 448 |
| H18Y/V20A/Q33L/E35D/M47V/Y53F | 257 | 353 | 449 |
| V22A/E35D/V68E/A71D | 258 | 354 | 450 |
| Q33L/E35D/M47L/A71G/F92S | 259 | 355 | 451 |
| V22A/R29H/E35D/D46E/M47I | 260 | 356 | 452 |
| Q33L/E35D/M43I/L85Q/R94W | 261 | 357 | 453 |
| H18Y/E35D/V68M/L97Q | 262 | 358 | 454 |
| Q33L/E35D/M47L/V68M/L85Q/E88D | 263 | 359 | 455 |
| Q33L/E35D/M43V/M47I/A71G | 264 | 360 | 456 |
| E35D/M47L/A71G/L97Q | 265 | 361 | 457 |
| E35D/M47V/A71G/L85M/L97Q | 266 | 362 | 458 |
| H18Y/Y31H/E35D/M47V/A71G/L85Q | 267 | 363 | 459 |
| E35D/D46E/M47V/L97Q | 268 | 364 | 460 |
| E35D/D46V/M47I/A71G/F92V | 269 | 365 | 461 |
| E35D/M47V/T62A/A71GN83A/Y87H/L97M | 270 | 366 | 462 |
| Q33L/E35D/N48K/L85Q/L97Q | 271 | 367 | 463 |
| E35D/L85Q/K93T/E95V/L97Q | 272 | 368 | 464 |
| E35D/M47V/N48K/V68M/K89N | 273 | 369 | 465 |
| Q33L/E35D/M47I/N48D/A71G | 274 | 370 | 466 |
| R29H/E35D/M43V/M47I/I49V | 275 | 371 | 467 |
| Q27H/E35D/M47I/L85Q/D90G | 276 | 372 | 468 |
| E35D/M47I/L85Q/D90G | 277 | 373 | 469 |
| E35D/M47I/T62S/L85Q | 278 | 374 | 470 |
| A26E/E35D/M47L/A71G | 279 | 375 | 471 |
| E35D/M47I/Y87Q/K89E | 280 | 376 | 472 |
| V22A/E35D/M47I/Y87N | 281 | 377 | 473 |
| H18Y/A26E/E35D/M47L/L85Q/D90G | 282 | 378 | 474 |
| E35D/M47L/A71G/L85Q | 283 | 379 | 475 |
| E35D/M47V/A71G/E88D | 284 | 380 | 476 |
| E35D/A71G | 285 | 381 | 477 |
| E35D/M47V/A71G | 286 | 382 | 478 |
| I30V/E35D/M47V/A71G/A91V | 287 | 383 | 479 |
| I30V/Y31C/E35D/M47V/A71G/L85M | 288 | 384 | 480 |
| V22D/E35D/M47L/L85Q | 289 | 385 | 481 |
| H18Y/E35D/N48K | 290 | 386 | 482 |
| E35D/T41S/M47V/A71G/K89N | 291 | 387 | 483 |
| E35D/M47V/N48T/L85Q | 292 | 388 | 484 |
| E35D/D46E/M47V/A71D/D90G | 293 | 389 | 485 |
| E35D/D46E/M47V/A71D | 294 | 390 | 486 |
| E35D/T41S/M43I/A71G/D90G | 295 | 391 | 487 |
| E35D/T41S/M43I/M47V/A71G | 296 | 392 | 488 |
| E35D/T41S/M43I/M47L/A71G | 297 | 393 | 489 |
| H18Y/V22A/E35D/M47V/T62S/A71G | 298 | 394 | 490 |
| H18Y/A26E/E35D/M47L/V68M/A71G/D90G | 299 | 395 | 491 |
| E35D/K37E/M47V/N48D/L85Q/D90N | 300 | 396 | 492 |
| Q27H/E35D/D46V/M47L/A71G | 301 | 397 | 493 |
| V22L/Q27H/E35D/M47I/A71G | 302 | 398 | 494 |
| E35D/D46V/M47L/V68M/L85Q/E88D | 303 | 399 | 495 |
| E35D/T41S/M43V/M47I/L70M/A71G | 304 | 400 | 496 |
| E35D/D46E/M47V/N63D/L85Q | 305 | 401 | 497 |
| E35D/M47V/T62A/A71D/K93E | 306 | 402 | 498 |
| E35D/D46E/M47V/V68M/D90G/K93E | 307 | 403 | 499 |
| E35D/M43I/M47V/K89N | 308 | 404 | 500 |
| E35D/M47L/A71G/L85M/F92Y | 309 | 405 | 501 |
| E35D/M42V/M47V/E52D/L85Q | 310 | 406 | 502 |
| V22D/E35D/M47L/L70M/L97Q | 311 | 407 | 503 |
| E35D/T41S/M47V/L97Q | 312 | 408 | 504 |
| E35D/Y53H/A71G/D90G/L97R | 313 | 409 | 505 |
| E35D/A71D/L72V/R73H/E81K | 314 | 410 | 506 |
| Q33L/E35D/M43I/Y53F/T62S/L85Q | 315 | 411 | 507 |
| E35D/M38T/D46E/M47V/N48S | 316 | 412 | 508 |
| Q33R/E35D/M47V/N48K/L85M/F92L | 317 | 413 | 509 |
| E35D/M38T/M43V/M47V/N48R/L85Q | 318 | 414 | 510 |
| T28Y/Q33H/E35D/D46V/M47I/A71G | 319 | 415 | 511 |
| E35D/N48K/L72V | 512 | 723 | 934 |
| E35D/T41S/N48T | 513 | 724 | 935 |
| D46V/M47I/A71G | 514 | 725 | 936 |
| M47I/A71G | 515 | 726 | 937 |
| E35D/M43I/M47L/L85M | 516 | 727 | 938 |
| E35D/M43I/D46E/A71G/L85M | 517 | 728 | 939 |
| H18Y/E35D/M47L/A71G/A91S | 518 | 729 | 940 |
| E35D/M47I/N48K/I61F | 519 | 730 | 941 |
| E35D/M47V/T62S/L85Q | 520 | 731 | 942 |
| M43I/M47L/A71G | 521 | 732 | 943 |
| E35D/M47V | 522 | 733 | 944 |
| E35D/M47L/A71G/L85M | 523 | 734 | 945 |
| V22A/E35D/M47L/A71G | 524 | 735 | 946 |
| E35D/M47L/A71G | 525 | 736 | 947 |
| E35D/D46E/M47I | 526 | 737 | 948 |
| Q27H/E35D/M47I | 527 | 738 | 949 |
| E35D/D46E/L85M | 528 | 739 | 950 |
| E35D/D46E/A91G | 529 | 740 | 951 |
| E35D/D46E | 530 | 741 | 952 |
| E35D/L97R | 531 | 742 | 953 |
| H18Y/E35D | 532 | 743 | 954 |
| Q27L/E35D/M47V/I61V/L85M | 533 | 744 | 955 |
| E35D/M47V/I61V/L85M | 534 | 745 | 956 |
| E35D/M47V/L85M/R94Q | 535 | 746 | 957 |
| E35D/M47V/N48K/L85M | 536 | 747 | 958 |
| H18Y/E35D/M47V/N48K | 537 | 748 | 959 |
| A26E/Q27R/E35D/M47L/N48Y/L85Q | 538 | 749 | 960 |
| E35D/D46E/M47L/V68M/L85Q/F92L | 539 | 750 | 961 |
| E35D/M47I/T62S/L85Q/E88D | 540 | 751 | 962 |
| E24D/Q27R/E35D/T41S/M47V/L85Q | 541 | 752 | 963 |
| S15T/H18Y/E35D/M47V/T62A/ | 542 | 753 | 964 |
| N64S/A71G/L85Q/D90N | | | |
| E35D/M47L/V68M/A71G/L85Q/D90G | 543 | 754 | 965 |
| H18Y/E35D/M47I/V68M/A71G/R94L | 544 | 755 | 966 |
| deltaE10-A98 | 545 | 756 | 967 |
| Q33R/M47V/T62N/A71G | 546 | 757 | 968 |
| H18Y/V22A/E35D/T41S/M47V/T62N/ | 547 | 758 | 969 |
| A71G/A91G | | | |
| E35D/M47L/L70M | 548 | 759 | 970 |
| E35D/M47L/V68M | 549 | 760 | 971 |
| E35D/D46V/M47L/V68M/E88D | 550 | 761 | 972 |
| E35D/D46V/M47L/V68M/D90G | 551 | 762 | 973 |
| E35D/D46V/M47L/V68M/K89N | 552 | 763 | 974 |
| E35D/D46V/M47L/V68M/L85Q | 553 | 764 | 975 |
| E35D/D46V/M47L/V68M | 554 | 765 | 976 |
| E35D/D46V/M47L/V70M | 555 | 766 | 977 |
| E35D/D46V/M47L/V70M/L85Q | 556 | 767 | 978 |
| E35D/M47V/N48K/V68M | 557 | 768 | 979 |
| E24D/E35D/M47L/V68M/E95V/L97Q | 558 | 769 | 980 |
| E35D/D46E/M47I/T62A/V68M/L85M/Y87C | 559 | 770 | 981 |
| E35D/D46E/M47I/V68M/L85M | 560 | 771 | 982 |
| E35D/D46E/M47L/V68M/A71G/Y87C/K93R | 561 | 772 | 983 |
| E35D/D46E/M47L/V68M/T79M/L85M | 562 | 773 | 984 |
| E35D/D46E/M47L/V68M/T79M/L85M/L97Q | 563 | 774 | 985 |
| E35D/D46E/M47V/V68M/L85Q | 564 | 775 | 986 |
| E35D/M43I/M47L/V68M | 565 | 776 | 987 |
| E35D/M47I/V68M/Y87N | 566 | 777 | 988 |
| E35D/M47L/V68M/E95V/L97Q | 567 | 778 | 989 |
| E35D/M47L/Y53F/V68M/A71G/K93R/E95V | 568 | 779 | 990 |
| E35D/M47V/N48K/V68M/A71G/L85M | 569 | 780 | 991 |
| E35D/M47V/N48K/V68M/L85M | 570 | 781 | 992 |
| E35D/M47V/V68M/L85M | 571 | 782 | 993 |
| E35D/M47V/V68M/L85M/Y87D | 572 | 783 | 994 |
| E35D/T41S/D46E/M47I/V68M/K93R/E95V | 573 | 784 | 995 |
| H18Y/E35D/D46E/M47I/V68M/R94L | 574 | 785 | 996 |
| H18Y/E35D/M38I/M47L/V68M/L85M | 575 | 786 | 997 |
| H18Y/E35D/M47I/V68M/Y87N | 576 | 787 | 998 |
| H18Y/E35D/M47L/V68M/A71G/L85M | 577 | 788 | 999 |
| H18Y/E35D/M47L/V68M/E95V/L97Q | 578 | 789 | 1000 |
| H18Y/E35D/M47L/Y53F/V68M/A71G | 579 | 790 | 1001 |
| H18Y/E35D/M47L/Y53F/V68M/ | 580 | 791 | 1002 |
| A71G/K93R/E95V | | | |
| H18Y/E35D/M47V/V68M/L85M | 581 | 792 | 1003 |
| H18Y/E35D/V68M/A71G/R94Q/E95V | 582 | 793 | 1004 |
| H18Y/E35D/V68M/L85M/R94Q | 583 | 794 | 1005 |
| H18Y/E35D/V68M/T79M/L85M | 584 | 795 | 1006 |
| H18Y/V22D/E35D/M47V/N48K/V68M | 585 | 796 | 1007 |
| Q27L/Q33L/E35D/T41S/M47V/ | 586 | 797 | 1008 |
| N48K/V68M/L85M | | | |
| Q33L/E35D/M47V/T62S/V68M/L85M | 587 | 798 | 1009 |
| Q33R/E35D/M38I/M47L/V68M | 588 | 799 | 1010 |
| R29C/E35D/M47L/V68M/A71G/L85M | 589 | 800 | 1011 |
| S21P/E35D/K37E/D46E/M47I/V68M | 590 | 801 | 1012 |
| S21P/E35D/K37E/D46E/M47I/V68M/R94L | 591 | 802 | 1013 |
| T13R/E35D/M47L/V68M | 592 | 803 | 1014 |
| T13R/H18Y/E35D/V68M/L85M/R94Q | 593 | 804 | 1015 |
| T13R/Q27L/Q33L/E35D/T41S/ | 594 | 805 | 1016 |
| M47V/N48K/V68M/L85M | | | |
| T13R/Q33L/E35D/M47L/V68M/L85M | 595 | 806 | 1017 |
| T13R/Q33L/E35D/M47V/T62S/V68M/L85M | 596 | 807 | 1018 |
| T13R/Q33R/E35D/M38I/M47L/V68M | 597 | 808 | 1019 |
| T13R/Q33R/E35D/M38I/M47L/ | 598 | 809 | 1020 |
| V68M/E95V/L97Q | | | |
| T13R/Q33R/E35D/M38I/M47L/V68M/L85M | 599 | 810 | 1021 |
| T13R/Q33R/E35D/M38I/M47L/ | 600 | 811 | 1022 |
| V68M/L85M/R94Q | | | |
| T13R/Q33R/E35D/M47L/V68M | 601 | 812 | 1023 |
| T13R/Q33R/E35D/M47L/V68M/L85M | 602 | 813 | 1024 |
| V22D/E24D/E35D/M47L/V68M | 603 | 814 | 1025 |
| V22D/E24D/E35D/M47L/V68M/L85M/D90G | 604 | 815 | 1026 |
| V22D/E24D/E35D/M47V/V68M | 605 | 816 | 1027 |
| D46V | 606 | 817 | 1028 |
| M47L | 607 | 818 | 1029 |
| V68M | 608 | 819 | 1030 |
| L85Q | 609 | 820 | 1031 |
| E35D/D46V | 610 | 821 | 1032 |
| E35D/V68M | 611 | 822 | 1033 |
| E35D/L85Q | 612 | 823 | 1034 |
| D46V/M47L | 613 | 824 | 1035 |
| D46V/V68M | 614 | 825 | 1036 |
| D46V/L85Q | 615 | 826 | 1037 |
| M47L/V68M | 616 | 827 | 1038 |
| M47L/L85Q | 617 | 828 | 1039 |
| V68M/L85Q | 618 | 829 | 1040 |
| E35D/D46V/M47L | 619 | 830 | 1041 |
| E35D/D46V/V68M | 620 | 831 | 1042 |
| E35D/D46V/L85Q | 621 | 832 | 1043 |
| E35D/V68M/L85Q | 622 | 833 | 1044 |
| D46V/M47L/V68M | 623 | 834 | 1045 |
| D46V/M47L/L85Q | 624 | 835 | 1046 |
| D46V/V68M/L85Q | 625 | 836 | 1047 |
| M47L/V68M/L85Q | 626 | 837 | 1048 |
| E35D/D46V/M47L/L85Q | 627 | 838 | 1049 |
| E35D/D46V/V68M/L85Q | 628 | 839 | 1050 |
| E35D/M47L/V68M/L85Q | 629 | 840 | 1051 |
| D46V/M47L/V68M/L85Q | 630 | 841 | 1052 |
| M47V | 631 | 842 | 1053 |
| N48K | 632 | 843 | 1054 |
| K89N | 633 | 844 | 1055 |
| E35D/N48K | 634 | 845 | 1056 |
| E35D/K89N | 635 | 846 | 1057 |
| M47V/N48K | 636 | 847 | 1058 |
| M47V/V68M | 637 | 848 | 1059 |
| M47V/K89N | 638 | 849 | 1060 |
| N48K/V68M | 639 | 850 | 1061 |
| N48K/K89N | 640 | 851 | 1062 |
| V68M/K89N | 641 | 852 | 1063 |
| E35D/M47V/N48K | 642 | 853 | 1064 |
| E35D/M47V/V68M | 643 | 854 | 1065 |
| E35D/M47V/K89N | 644 | 855 | 1066 |
| E35D/N48K/V68M | 645 | 856 | 1067 |
| E35D/N48K/K89N | 646 | 857 | 1068 |
| E35D/V68M/K89N | 647 | 858 | 1069 |
| M47V/N48K/V68M | 648 | 859 | 1070 |
| M47V/N48K/K89N | 649 | 860 | 1071 |
| M47V/V68M/K89N | 650 | 861 | 1072 |
| N48K/V68M/K89N | 651 | 862 | 1073 |
| E35D/M47V/N48K/K89N | 652 | 863 | 1074 |
| E35D/M47V/V68M/K89N | 653 | 864 | 1075 |
| E35D/N48K/V68M/K89N | 654 | 865 | 1076 |
| M47V/N48K/V68M/K89N | 655 | 866 | 1077 |
| E35D/D46V/M47V/N48K/V68M | 656 | 867 | 1078 |
| E35D/D46V/M47V/V68M/L85Q | 657 | 868 | 1079 |
| E35D/D46V/M47V/V68M/K89N | 658 | 869 | 1080 |
| E35D/M47V/N48K/V68M/L85Q | 659 | 870 | 1081 |
| E35D/M47V/V68M/L85Q/K89N | 660 | 871 | 1082 |
| A26E/E35D/M47L/V68M/A71G/D90G | 661 | 872 | 1083 |
| H18Y/E35D/M47L/V68M/A71G/D90G | 662 | 873 | 1084 |
| H18Y/A26E/M47L/V68M/A71G/D90G | 663 | 874 | 1085 |
| H18Y/A26E/E35D/V68M/A71G/D90G | 664 | 875 | 1086 |
| H18Y/A26E/E35D/M47L/A71G/D90G | 665 | 876 | 1087 |
| H18Y/A26E/E35D/M47L/V68M/D90G | 666 | 877 | 1088 |
| H18Y/A26E/E35D/M47L/V68M/A71G | 667 | 878 | 1089 |
| E35D/M47L/V68M/A71G/D90G | 668 | 879 | 1090 |
| H18Y/M47L/V68M/A71G/D90G | 669 | 880 | 1091 |
| H18Y/A26E/V68M/A71G/D90G | 670 | 881 | 1092 |
| H18Y/A26E/E35D/A71G/D90G | 671 | 882 | 1093 |
| H18Y/A26E/E35D/M47L/D90G | 672 | 883 | 1094 |
| H18Y/A26E/E35D/M47L/V68M | 673 | 884 | 1095 |
| A26E/M47L/V68M/A71G/D90G | 674 | 885 | 1096 |
| A26E/E35D/V68M/A71G/D90G | 675 | 886 | 1097 |
| A26E/E35D/M47L/A71G/D90G | 676 | 887 | 1098 |
| A26E/E35D/M47L/V68M/D90G | 677 | 888 | 1099 |
| A26E/E35D/M47L/V68M/A71G | 678 | 889 | 1100 |
| H18Y/E35D/V68M/A71G/D90G | 679 | 890 | 1101 |
| H18Y/E35D/M47L/A71G/D90G | 680 | 891 | 1102 |
| H18Y/E35D/M47L/V68M/D90G | 681 | 892 | 1103 |
| H18Y/E35D/M47L/V68M/A71G | 682 | 893 | 1104 |
| H18Y/A26E/M47L/A71G/D90G | 683 | 894 | 1105 |
| H18Y/A26E/M47L/V68M/D90G | 684 | 895 | 1106 |
| H18Y/A26E/M47L/V68M/A71G | 685 | 896 | 1107 |
| H18Y/A26E/E35D/V68M/D90G | 686 | 897 | 1108 |
| H18Y/A26E/E35D/V68M/A71G | 687 | 898 | 1109 |
| H18Y/A26E/E35D/M47L/A71G | 688 | 899 | 1110 |
| M47L/V68M/A71G/D90G | 689 | 900 | 1111 |
| H18Y/V68M/A71G/D90G | 690 | 901 | 1112 |
| H18Y/A26E/A71G/D90G | 691 | 902 | 1113 |
| H18Y/A26E/E35D/D90G | 692 | 903 | 1114 |
| H18Y/A26E/E35D/M47L | 693 | 904 | 1115 |
| E35D/V68M/A71G/D90G | 694 | 905 | 1116 |
| E35D/M47L/A71G/D90G | 695 | 906 | 1117 |
| E35D/M47L/V68M/D90G | 696 | 907 | 1118 |
| E35D/M47L/V68M/A71G | 697 | 908 | 1119 |
| A26E/V68M/A71G/D90G | 698 | 909 | 1120 |
| A26E/M47L/A71G/D90G | 699 | 910 | 1121 |
| A26E/M47L/V68M/D90G | 700 | 911 | 1122 |
| A26E/M47L/V68M/A71G | 701 | 912 | 1123 |
| A26E/E35D/A71G/D90G | 702 | 913 | 1124 |
| A26E/E35D/V68M/D90G | 703 | 914 | 1125 |
| A26E/E35D/V68M/A71G | 704 | 915 | 1126 |
| A26E/E35D/M47L/D90G | 705 | 916 | 1127 |
| A26E/E35D/M47L/V68M | 706 | 917 | 1128 |
| H18Y/M47L/A71G/D90G | 707 | 918 | 1129 |
| H18Y/M47L/V68M/D90G | 708 | 919 | 1130 |
| H18Y/M47L/V68M/A71G | 709 | 920 | 1131 |
| H18Y/E35D/A71G/D90G | 710 | 921 | 1132 |
| H18Y/E35D/V68M/D90G | 711 | 922 | 1133 |
| H18Y/E35D/V68M/A71G | 712 | 923 | 1134 |
| H18Y/E35D/M47L/D90G | 713 | 924 | 1135 |
| H18Y/E35D/M47L/A71G | 714 | 925 | 1136 |
| H18Y/E35D/M47L/V68M | 715 | 926 | 1137 |
| H18Y/A26E/V68M/D90G | 716 | 927 | 1138 |
| H18Y/A26E/V68M/A71G | 717 | 928 | 1139 |
| H18Y/A26E/M47L/D90G | 718 | 929 | 1140 |
| H18Y/A26E/M47L/A71G | 719 | 930 | 1141 |
| H18Y/A26E/M47L/V68M | 720 | 931 | 1142 |
| H18Y/A26E/E35D/A71G | 721 | 932 | 1143 |
| H18Y/A26E/E35D/V68M | 722 | 933 | 1144 |
| H18Y/E35D/M47V/V68M/A71G | 1145 | 1176 | 1207 |
| H18C/A26P/E35D/M47L/V68M/A71G | 1146 | 1177 | 1208 |
| H18I/A26P/E35D/M47V/V68M/A71G | 1147 | 1178 | 1209 |
| H18L/A26N/D46E/V68M/A71G/D90G | 1148 | 1179 | 1210 |
| H18L/E35D/M47V/V68M/A71G/D90G | 1149 | 1180 | 1211 |
| H18T/A26N/E35D/M47L/V68M/A71G | 1150 | 1181 | 1212 |
| H18V/A26K/E35D/M47L/V68M/A71G | 1151 | 1182 | 1213 |
| H18V/A26N/E35D/M47V/V68M/A71G | 1152 | 1183 | 1214 |
| H18V/A26P/E35D/M47V/V68L/A71G | 1153 | 1184 | 1215 |
| H18V/A26P/E35D/M47L/V68M/A71G | 1154 | 1185 | 1216 |
| H18V/E35D/M47V/V68M/A71G/D90G | 1155 | 1186 | 1217 |
| H18Y/A26P/E35D/M47I/V68M/A71G | 1156 | 1187 | 1218 |
| H18Y/A26P/E35D/M47V/V68M/A71G | 1157 | 1188 | 1219 |
| H18Y/E35D/M47V/V68L/A71G/D90G | 1158 | 1189 | 1220 |
| H18Y/E35D/M47V/V68M/A71G/D90G | 1159 | 1190 | 1221 |
| A26P/E35D/M47I/V68M/A71G/D90G | 1160 | 1191 | 1222 |
| H18V/A26G/E35D/M47V/V68M/A71G/D90G | 1161 | 1192 | 1223 |
| H18V/A26S/E35D/M47L/V68M/A71G/D90G | 1162 | 1193 | 1224 |
| H18V/A26R/E35D/M47L/V68M/A71G/D90G | 1163 | 1194 | 1225 |
| H18V/A26D/E35D/M47V/V68M/A71G/D90G | 1164 | 1195 | 1226 |
| H18V/A26Q/E35D/M47V/V68L/A71G/D90G | 1165 | 1196 | 1227 |
| H18A/A26P/E35D/M47L/V68M/A71G/D90G | 1166 | 1197 | 1228 |
| H18A/A26N/E35D/M47L/V68M/A71G/D90G | 1167 | 1198 | 1229 |
| H18F/A26P/E35D/M47I/V68M/A71G/D90G | 1168 | 1199 | 1230 |
| H18F/A26H/E35D/M47L/V68M/A71G/D90G | 1169 | 1200 | 1231 |
| H18F/A26N/E35D/M47V/V68M/A71G/D90K | 1170 | 1201 | 1232 |
| H18Y/A26N/E35D/M47F/V68M/A71G/D90G | 1171 | 1202 | 1233 |
| H18Y/A26P/E35D/M47Y/V68I/A71G/D90G | 1172 | 1203 | 1234 |
| H18Y/A26Q/E35D/M47T/V68M/A71G/D90G | 1173 | 1204 | 1235 |
| H18R/A26P/E35D/D46N/M47V/ | 1174 | 1205 | 1236 |
| V68M/A71G/D90P | | | |
| H18F/A26D/E35D/D46E/M47T/ | 1175 | 1206 | 1237 |
| V68M/A71G/D90G | | | |
| L70Q/A91G | 1447 | 1256 | 1370 |
| L70Q/A91G/T130A | 1448 | | |
| L70Q/A91G/I118A/T120S/T130A | 1449 | | |
| V4M/L70Q/A91G/T120S/T130A | 1450 | 1257 | |
| L70Q/A91G/T120S/T130A | 1451 | | |
| V20L/L70Q/A91S/T120S/T130A | 1452 | 1258 | |
| S44P/L70Q/A91G/T130A | 1453 | 1259 | |
| L70Q/A91G/E117G/T120S/T130A | 1454 | | |
| A91G/T120S/T130A | 1455 | 1260 | |
| L70R/A91G/T120S/T130A | 1456 | 1261 | |
| L70Q/E81A/A91G/T120S/I127T/T130A | 1457 | 1262 | |
| L70Q/Y87N/A91G/T130A | 1458 | 1263 | |
| T28S/L70Q/A91G/E95K/T120S/T130A | 1459 | 1264 | |
| N63S/L70Q/A91G/T120S/T130A | 1460 | 1265 | |
| K36E/I67T/L70Q/A91G/T120S/T130A/N152T | 1461 | 1266 | |
| E52G/L70Q/A91G/T120S/T130A | 1462 | 1267 | |
| K37E/F59S/L70Q/A91G/T120S/T130A | 1463 | 1268 | |
| A91G/S103P | 1464 | | 1368 |
| K89E/T130A | 1465 | 1269 | 1381 |
| A91G | 1466 | 1257 | 1371 |
| D60V/A91G/T120S/T130A | 1467 | 1270 | |
| K54M/A91G/T120S | 1468 | 1271 | |
| M38T/L70Q/E77G/A91G/T120S/T130A/N152T | 1469 | 1272 | |
| R29H/E52G/L70R/E88G/A91G/T130A | 1470 | 1273 | |
| Y31H/T41G/L70Q/A91G/T120S/T130A | 1471 | 1274 | |
| V68A/T110A | 1472 | 1275 | |
| S66H/D90G/T110A/F116L | 1473 | 1276 | |
| R29H/E52G/T120S/T130A | 1474 | 1277 | |
| A91G/L102S | 1475 | | 1382 |
| I67T/L70Q/A91G/T120S | 1476 | 1278 | |
| L70Q/A91G/T110A/T120S/T130A | 1477 | | |
| M38V/T41D/M43I/W50G/D76G/ | 1478 | 1279 | |
| V83A/K89E/T120S/T130A | | | |
| V22A/L70Q/S121P | 1479 | 1280 | |
| A12V/S15F/Y31H/T41G/T130A/P137L/N152T | 1480 | 1281 | |
| I67F/L70R/E88G/A91G/T120S/T130A | 1481 | 1282 | |
| E24G/L25P/L70Q/T120S | 1482 | 1283 | |
| A91G/F92L/F108L/T120S | 1483 | 1284 | |
| R29D/Y31L/Q33H/K36G/M38I/ | 1484 | 1285 | |
| T41A/M43R/M47T/E81V/ | | | |
| L85R/K89N/A91T/F92P/K93V/ | | | |
| R94L/I118T/N149S | | | |
| R29D/Y31L/Q33H/K36G/M38I/ | 1485 | | |
| T41A/M43R/M47T/E81V/ | | | |
| L85R/K89N/A91T/F92P/K93V/ | | | |
| R94L/N144S/N149S | | | |
| R29D/Y31L/Q33H/K36G/M38I/ | 1486 | 1286 | |
| T41A/M42T/M43R/M47T/ | | | |
| E81V/L85R/K89N/A91T/F92P/ | | | |
| K93V/R94L/L148S/N149S | | | |
| E24G/R29D/Y31L/Q33H/K36G/ | 1487 | 1287 | |
| M38I/T41A/M43R/M47T/ | | | |
| F59L/E81V/L85R/K89N/A91T/ | | | |
| F92P/K93V/R94L/H96R/ | | | |
| N149S/C182S | | | |
| R29D/Y31L/Q33H/K36G/M38I/ | 1488 | | |
| T41A/M43R/M47T/E81V/ | | | |
| L85R/K89N/A91T/F92P/K93V/R94L/N149S | | | |
| R29V/M43Q/E81R/L85I/K89R/ | 1489 | 1288 | 1372 |
| D90L/A91E/F92N/K93Q/ | | | |
| R94G | | | |
| T41I/A91G | 1490 | 1289 | 1373 |
| K89R/D90K/A91G/F92Y/K93R/N122S/N177S | 1491 | 1290 | |
| K89R/D90K/A91G/F92Y/K93R | 1492 | 1367 | 1374 |
| K36G/K37Q/M38I/F59L/E81V/ | 1493 | 1291 | |
| L85R/K89N/A91T/F92P/ | | | |
| K93V/R94L/E99G/T130A/N149S | | | |
| E88D/K89R/D90K/A91G/F92Y/K93R | 1494 | 1292 | 1375 |
| K36G/K37Q/M38I/L40M | 1495 | 1293 | 1376 |
| K36G | 1496 | 1294 | 1377 |
| R29H/Y31H/T41G/Y87N/E88G/ | 1497 | 1295 | |
| K89E/D90N/A91G/P109S | | | |
| A12T/H18L/M43V/F59L/E77K/P109S/I118T | 1498 | 1296 | |
| R29V/Y31F/K36G/M38L/ | 1499 | 1297 | 1378 |
| M43Q/E81R/V83I/L85I/K89R/ | | | |
| D90L/A91E/F92N/K93Q/R94G | | | |
| V68M/L70P/L72P/K86E | 1500 | 1298 | 1379 |
| R29D/Y31L/Q33H/K36G/M38I/ | 1299 | | |
| T41A/M43R/M47T/E81V/ | | | |
| L85R/K89N/A91T/F92P/K93V/ | | | |
| R94L/T120S/I127T/T130A/ | | | |
| K169E | | | |
| R29D/Y31L/Q33H/K36G/M38I/ | 1300 | | |
| T41A/M43R/M47T/L70Q/ | | | |
| E81V/L85R/K89N/A91T/F92P/ | | | |
| K93V/R94L/T120S/I127T/T130A | | | |
| H18L/R29D/Y31L/Q33H/K36G/ | 1301 | | |
| M38I/T41A/M43R/M47T/ | | | |
| E81V/L85R/K89N/A91T/F92P/ | | | |
| K93V/R94L/T120S/I127T/ | | | |
| T130A/K169E | | | |
| R29D/Y31L/Q33H/K36G/M38I/ | 1302 | | |
| T41A/M43R/M47T/E81V/ | | | |
| L85R/K89N/A91T/F92P/K93V/ | | | |
| R94L/T120S/T130A/M174T | | | |
| R29D/Y31L/Q33H/K36G/M38I/ | 1303 | | |
| T41A/M43R/M47T/F59L/ | | | |
| E81V/L85R/K89N/A91T/F92P/ | | | |
| K93V/R94L/T120S/I127T/ | | | |
| T130A/H188D | | | |
| H18R/R29D/Y31L/Q33H/K36G/ | 1304 | | |
| K37E/M38I/T41A/M43R/ | | | |
| M47T/L70Q/E81V/L85R/K89N/ | | | |
| A91T/F92P/K93V/R94L/T120S/ | | | |
| T130A/K169E/H188D | | | |
| R29D/Y31L/Q33H/K36G/M38I/ | 1305 | | |
| T41A/M43R/M47T/L70Q/ | | | |
| E81V/L85R/K89N/A91T/F92P/ | | | |
| K93V/R94L/T120S/I127T/ | | | |
| T130A/E143G/K169E/M174V/H188D | | | |
| R29D/Y31L/Q33H/K36G/M38I/ | 1306 | | |
| T41A/M43R/M47T/L70Q/ | | | |
| E81V/L85R/K89N/A91T/F92P/ | | | |
| K93V/R94L/T120S/I127T/T130A | | | |
| R29D/Y31L/Q33H/K36G/M38I/ | 1307 | | |
| T41A/M43R/M47T/E81V/ | | | |
| L85R/K89N/A91T/F92P/K93V/ | | | |
| R94L/T120S/I127T/T130A/ | | | |
| H188D | | | |
| R29D/Y31L/Q33H/K36G/M38I/ | 1308 | | |
| T41A/M43R/M47T/L70Q/ | | | |
| E81V/L85R/K89N/A91T/F92P/ | | | |
| K93V/R94L/T120S/I127T/ | | | |
| T130A/K169E | | | |
| R29D/Y31L/Q33H/K36G/M38I/ | 1309 | | |
| T41A/M43R/M47T/L70Q/ | | | |
| E81V/L85R/K89N/A91T/F92P/ | | | |
| K93V/R94L/T120S/I127T/T130A | | | |
| R29D/Y31L/Q33H/K36G/M38I/ | 1310 | | |
| T41A/M43R/M47T/L85R/ | | | |
| K89N/A91T/F92P/K93V/R94L/ | | | |
| T120S/I127T/T130A/K169E/ | | | |
| H188D | | | |
| R29D/Y31L/Q33H/K36G/M38I/ | 1311 | | |
| T41A/M43R/M47T/E81V/ | | | |
| L85R/K89N/A91T/F92P/K93V/ | | | |
| R94L/F108L/T120S/T130A/ | | | |
| K169E/H188D | | | |
| R29D/Y31L/Q33H/K36G/M38I/ | 1312 | | |
| T41A/M43R/M47T/L70Q/ | | | |
| E81V/L85R/K89N/A91T/F92P/ | | | |
| K93V/R94L/T130A/H188D | | | |
| R29D/Y31L/Q33H/K36G/M38I/ | 1313 | | |
| T41A/M43R/M47T/L70Q/ | | | |
| E81V/L85R/K89N/A91T/F92P/ | | | |
| K93V/R94L/T120S/I127T/ | | | |
| T130A/K169E | | | |
| H18L/R29D/Y31L/Q33H/K36G/ | 1314 | | |
| M38I/T41A/M43R/M47T/ | | | |
| L70Q/E81V/L85R/K89N/A91T/ | | | |
| F92P/K93V/R94L/T120S/ | | | |
| T130A/K169E/H188D | | | |
| R29D/Y31L/Q33H/K36G/M38I/ | 1315 | | |
| T41A/M43R/M47T/E81V/ | | | |
| L85R/K89N/A91T/F92P/K93V/ | | | |
| R94L/T120S/I127T/C128Y/ | | | |
| T130A/H188D | | | |
| R29D/Y31L/Q33H/K36G/M38I/ | 1316 | | |
| T41A/M43R/M47T/E81V/ | | | |
| L85R/K89N/A91T/F92P/K93V/ | | | |
| R94F/T130A/K169E | | | |
| H18L/R29D/Y31L/Q33H/K36G/ | 1317 | | |
| M38I/T41A/M43R/M47T/ | | | |
| E81V/L85R/K89N/A91T/F92P/ | | | |
| K93V/R94L/T130A | | | |
| H18L/R29D/Y31L/Q33H/K36G/ | 1318 | | |
| M38I/T41A/M43R/M47T/ | | | |
| L70Q/E81V/L85R/K89N/A91T/ | | | |
| F92P/K93V/R94L/T120S/ | | | |
| T130A/K169E | | | |
| R29D/Y31L/Q33H/K36G/M38I/ | 1319 | | |
| T41A/M43R/M47T/L70Q/ | | | |
| E81V/L85R/K89N/A91T/F92P/ | | | |
| K93I/R94L/L97R/T130A | | | |
| R29D/Y31L/Q33H/K36G/M38I/ | 1320 | | |
| T41A/M43R/M47T/L70Q/ | | | |
| E81V/L85R/K89N/A91T/F92P/ | | | |
| K93I/R94L/L97R/T130A/L148S | | | |
| H18L/R29D/Y31L/Q33H/K36G/ | 1321 | | |
| M38I/T41A/M43R/M47T/ | | | |
| E81V/L85R/K89N/A91T/F92P/ | | | |
| K93V/R94L/I118V/T120S/I127T/ | | | |
| T130A/K169E | | | |
| R29D/Y31L/Q33H/K36G/M38I/ | 1322 | | |
| T41A/M43R/M47T/I61N/ | | | |
| E81V/L85R/K89N/A91T/F92P/ | | | |
| K93V/R94F/V104A/T120S/T130A | | | |
| R29D/Y31L/Q33H/K36G/M38I/ | 1323 | | |
| T41A/M43R/M47T/E81V/ | | | |
| L85R/K89N/F92P/K93V/R94F/ | | | |
| I118V/T130A | | | |
| R29D/Y31L/Q33H/K36G/M38I/ | 1324 | | |
| T41A/M43R/M47T/T62S/ | | | |
| E81V/L85R/K89N/A91T/F92P/ | | | |
| K93V/R94L/I118V/T120S/T130A/ | | | |
| K169E/T175A | | | |
| H18L/R29D/Y31L/Q33H/K36G/ | 1325 | | |
| M38I/T41A/M43R/M47T/ | | | |
| E81V/L85R/K89N/A91T/F92P/ | | | |
| K93V/R94L/F116S/T130A/ | | | |
| H188D | | | |
| H18L/R29D/Y31L/Q33H/K36G/ | 1326 | | |
| M38I/T41A/M43R/M47T/ | | | |
| E81V/L85R/K89N/A91T/F92P/ | | | |
| K93V/R94L/T120S/I127T/ | | | |
| T130A/L142S/H188D | | | |
| C16S/H18L/R29D/Y31L/Q33H/ | 1327 | | |
| K36G/M38I/T41A/M43R/ | | | |
| M47T/E81V/L85R/K89N/A91T/ | | | |
| F92P/K93V/R94L/T110A/ | | | |
| H188D | | | |
| R29D/Y31L/Q33H/K36G/M38I/ | 1328 | | |
| T41A/M43R/M47T/A91G/ | | | |
| T120S/I127T/T130A/H188D | | | |
| R29D/Y31L/Q33H/K36G/M38I/ | 1329 | | |
| T41A/M43R/M47T/L70Q/ | | | |
| D76G/A91G/S103L/T120S/I127T/T130A | | | |
| DELTAQ33/Y53C/L85R/K89N/ | 1330 | | |
| A91T/F92P/K93V/R94L/ | | | |
| T120S/I127T/T130A/K169E | | | |
| T62S/E81V/L85R/K89N/A91T/ | 1331 | | |
| F92P/K93V/R94L/T120S/ | | | |
| T130A/K169E | | | |
| R29D/Y31L/Q33H/K36G/M38I/ | 1332 | | |
| T41A/M43R/M47T/E81V/ | | | |
| L85R/K89N/A91T/F92P/K93V/ | | | |
| R94L/S129L/H188D | | | |
| K9E/E10R/V11S/A12G/T13N/ | 1333 | | |
| L14A/S15V/C16L/G17W/ | | | |
| H18Y/Y53C/L70Q/D90G/T130A/ | | | |
| N149D/N152T/H188D | | | |
| H18L/R29D/Y31L/Q33H/K36G/ | 1334 | | |
| T41A/M43R/M47T/E81V/ | | | |
| L85R/K89N/A91T/F92P/K93V/ | | | |
| R94L/I118V/T120S/I127T/ | | | |
| T130A/H188D | | | |
| K89E/K93E/T130A | 1335 | | |
| S21P/R29D/Y31L/Q33H/K36G/ | 1336 | | |
| M38I/T41A/M43R/M47T/ | | | |
| N48I/V68A/E81V/L85R/K89N/ | | | |
| A91T/F92P/K93V/R94L/ | | | |
| P109H/I126L/K169I | | | |
| H18L/R29D/Y31L/Q33H/K36G/ | 1337 | 1366 | 1380 |
| M38I/T41A/M43R/M47T/ | | | |
| P74L/Y80N/E81V/L85R/K89N/ | | | |
| A91T/F92P/K93V/R94L/ | | | |
| L97R | | | |
| S21P/R29D/Y31L/Q33H/K36G/ | 1338 | | |
| M38I/T41A/M43R/M47T/ | | | |
| P74L/Y80N/E81V/L85R/K89N/ | | | |
| D90N/A91T/F92P/K93V/R94L/ | | | |
| T130A/N149S/E162G | | | |
| H18L/R29D/Y31L/Q33H/K36G/ | 1339 | | |
| M38I/T41A/M43R/M47T/ | | | |
| V68M/E81V/L85R/K89N/A91T/ | | | |
| F92P/K93V/R94L/T130A | | | |
| R29D/Y31L/Q33H/K36G/M38I/ | 1340 | | |
| T41A/M43R/M47T/V68M/ | | | |
| E81V/L85R/K89N/A91T/F92P/ | | | |
| K93V/R94L/T130A/N149S/ | | | |
| R190S | | | |
| H18L/R29D/Y31L/Q33H/K36G/ | 1341 | | |
| M38I/T41A/M43R/M47T/ | | | |
| P74L/Y80N/E81V/L85R/K89N/ | | | |
| A91T/F92P/K93V/R94L/ | | | |
| T130A/R190S | | | |
| C16G/V22A/R29D/Y31L/Q33H/ | 1342 | | |
| K36G/M38I/T41A/M43R/ | | | |
| M47T/V68M/D76G/E81V/L85R/ | | | |
| K89N/A91T/F92P/K93V/R94L/ | | | |
| I118T/T130A/S140T/N149S/ | | | |
| K169I/H178R/N192D | | | |
| R29D/Y31L/Q33H/K36G/M38I/ | 1343 | | |
| T41A/M43R/M47T/E81V/ | | | |
| L85R/K89N/A91T/F92P/K93V/ | | | |
| R94F/E117V/I118T/N149S/ | | | |
| S168G/H188Q | | | |
| V22A/R29D/Y31L/Q33H/K36G/ | 1344 | | |
| M38I/T41A/M43R/M47T/ | | | |
| V68M/E81V/L85R/K89N/A91T/ | | | |
| F92P/K93V/R94L/T130A | | | |
| R29D/Y31L/Q33H/K36G/M38I/ | 1345 | | |
| T41A/M43R/M47T/N64S/ | | | |
| E81V/L85R/K89N/A91T/F92P/K93V/ | | | |
| R94F/I118T/T130A/N149S/K169I | | | |
| V22A/R29D/Y31L/Q33H/K36G/ | 1346 | | |
| M38I/T41A/M43R/M47T/ | | | |
| V68M/E81V/L85R/K89N/A91T/ | | | |
| F92P/K93V/R94L/D115G/ | | | |
| I118T/T130A/G133D/N149S | | | |
| S129P | 1347 | | |
| A91G/S129P | 1348 | | |
| I69T/L70Q/A91G/T120S | 1349 | | |
| Y31H/S129P | 1350 | | |
| T28A/R29D/Y31L/Q33H/K36G/ | 1351 | | |
| M38I/T41A/M43R/M47T/ | | | |
| E81V/L85R/K89N/A91T/F92P/K93V/R94L/ | | | |
| V104L/T130A/N149S | | | |
| H18L/R29D/Y31L/Q33H/K36G/ | 1352 | | |
| M38I/T41A/M43R/M47T/ | | | |
| E81V/L85R/K89N/A91T/F92P/ | | | |
| K93V/R94L/L97R/N149S/ | | | |
| H188Q | | | |
| H18L/R29D/Y31L/Q33H/K36G/ | 1353 | | |
| M38I/T41A/M43R/M47T/ | | | |
| E81V/L85R/K89N/A91T/F92P/ | | | |
| K93V/R94L/L97R/N149S | | | |
| H18L/R29D/Y31L/Q33H/K36G/ | 1354 | | |
| M38I/T41A/M43R/M47T/ | | | |
| V68A/E81V/L85R/K89N/A91T/ | | | |
| F92P/K93V/R94L/ | | | |
| T130A/N149S/T154I | | | |
| A12G/R29D/Y31L/Q33H/K36G/ | 1355 | | |
| M38I/T41A/M43R/M47T/ | | | |
| V68A/E81V/L85R/K89N/A91T/ | | | |
| F92P/K93V/R94L/ | | | |
| L97R/T130A/L183H | | | |
| R29D/Y31L/Q33H/K36G/M38I/ | 1356 | | |
| T41A/M43R/M47T/E81V/ | | | |
| L85R/K89N/A91T/F92P/K93V/ | | | |
| R94L/I118T/T130A/S140T/ | | | |
| N149S/K169S | | | |
| R29D/Y31L/Q33H/K36G/M38I/ | 1357 | | |
| T41A/M43R/M47T/E81V/ | | | |
| L85R/K89N/A91T/F92P/K93V/ | | | |
| R94L/I118T/T130A/N149S/ | | | |
| K169I/Q193L | | | |
| V22A/R29D/Y31L/Q33H/K36G/ | 1358 | | |
| M38I/T41A/M43R/M47T/ | | | |
| E81V/L85R/K89N/A91T/F92P/K93V/ | | | |
| R94L/I118T/T130A/N149S | | | |
| R29D/Y31L/Q33H/K36G/M38I/ | 1359 | | |
| T41A/M43R/M47T/E81V/ | | | |
| L85R/K89N/A91T/F92P/K93V/R94L/ | | | |
| I118T/T130A/N149S | | | |
| R29D/Y31L/Q33H/K36G/M38I/T41A/ | 1360 | | |
| M43R/M47T/E81V/ | | | |
| L85R/K89N/A91T/F92P/K93V/ | | | |
| R94L/I118T/T130A/N149S/ | | | |
| K169I | | | |
| R29D/Y31L/Q33H/K36G/M38I/ | 1361 | | |
| T41A/M43R/M47T/E81V/ | | | |
| L85R/K89N/A91T/F92P/K93V/ | | | |
| R94F/T130A/N149S/K169I | | | |
| I118T/C128R | 1362 | | |
| Q27R/R29C/M42T/S129P/E160G | 1363 | | |
| S129P/T154A | 1364 | | |
| S21P/L70Q/D90G/T120S/T130A | 1365 | | |
| L70Q/A91G/N144D | 1383 | | |
| L70Q/A91G/I118A/T120S/T130A/K169E | 1384 | | |
| V4M/L70Q/A91G/I118V/T120S/T130A/K169E | 1385 | | |
| L70Q/A91G/I118V/T120S/T130A/K169E | 1386 | | |
| L70Q/A91G/I118V/T120S/T130A | 1387 | | |
| V20L/L70Q/A91S/I118V/T120S/T130A | 1388 | | |
| L70Q/A91G/E117G/I118V/T120S/T130A | 1389 | | |
| A91G/I118V/T120S/T130A | 1390 | | |
| L70R/A91G/I118V/T120S/T130A/T199S | 1391 | | |
| L70Q/E81A/A91G/I118V/T120S/I127T/T130A | 1392 | | |
| T28S/L70Q/A91G/E95K/I118V/ | 1393 | | |
| T120S/I126V/T130A/K169E | | | |
| N63S/L70Q/A91G/S114T/I118V/T120S/T130A | 1394 | | |
| K36E/I67T/L70Q/A91G/I118V/ | 1395 | | |
| T120S/T130A/N152T | | | |
| E52G/L70Q/A91G/D107N/I118V/ | 1396 | | |
| T120S/T130A/K169E | | | |
| K37E/F59S/L70Q/A91G/I118V/ | 1397 | | |
| T120S/T130A/K185E | | | |
| D60V/A91G/I118V/T120S/T130AK169E | 1398 | | |
| K54M/L70Q/A91G/Y164H/T120S | 1399 | | |
| M38T/L70Q/E77G/A91G/I118V/ | 1400 | | |
| T120S/T130A/N152T | | | |
| Y31H/T41G/M43L/L70Q/A91G/ | 1401 | | |
| I118V/T120S/I126V/T130A | | | |
| L65H/D90G/T110A/F116L | 1402 | | |
| R29H/E52G/D90N/I118V/T120S/T130A | 1403 | | |
| 167T/L70Q/A91G/I118V/T120S | 1405 | | |
| L70Q/A91G/T110A/I118V/T120S/T130A | 1406 | | |
| M38V/T41D/M43I/W50G/D76G/ | 1407 | | |
| V83A/K89E/I118V/T120S/ | | | |
| I126V/T130A | | | |
| A12V/S15F/Y31H/M38L/T41G/ | 1408 | | |
| M43L/D90N/T130A/P137L/ | | | |
| N149D/N152T | | | |
| I67F/L70R/E88G/A91G/I118V/T120S/T130A | 1409 | | |
| E24G/L25P/L70Q/A91G/I118V/T120S/N152T | 1410 | | |
| A91G/F92L/F108L/I118V/T120S | 1411 | | |
| E88D/K89R/D90K/A91G/F92Y/ | 1412 | | |
| K93R/N122S/N177S | | | |
| K36G/K37Q/M38I/L40M/F59L/ | 1413 | | |
| E81V/L85R/K89N/A91T/ | | | |
| F92P/K93V/R94L/E99G/T130A/N149S | | | |
| K36G/L40M | 1414 | 1445 | 1446 |
| R29D/Y31L/Q33H/K36G/M38I/T41A/ | 1415 | | |
| M43R/M47T/E81V/ | | | |
| L85R/K89N/A91T/F92P/K93V/ | | | |
| R94L/I118V/T120S/I127T/ | | | |
| T130A/K169E | | | |
| R29D/Y31L/Q33H/K36G/M38I/ | 1416 | | |
| T41A/M43R/M47T/L70Q/ | | | |
| E81V/L85R/K89N/A91T/F92P/ | | | |
| K93V/R94L/I118V/T120S/I127T/ | | | |
| T130A | | | |
| H18L/R29D/Y31L/Q33H/K36G/ | 1417 | | |
| M38I/T41A/M43R/M47T/ | | | |
| E81V/L85R/K89N/A91T/F92P/ | | | |
| K93V/R94L/I118V/T120S/I127T/ | | | |
| T130A/K169E | | | |
| R29D/Y31L/Q33H/K36G/M38I/ | 1418 | | |
| T41A/M43R/M47T/E81V/ | | | |
| L85R/K89N/A91T/F92P/K93V/ | | | |
| R94L/I118V/T120S/T130A/ | | | |
| K169E/M174T | | | |
| R29D/Y31L/Q33H/K36G/M38I/ | 1419 | | |
| T41A/M43R/M47T/N48D/ | | | |
| F59L/E81V/L85R/K89N/A91T/ | | | |
| F92P/K93V/R94L/I118V/T120S/ | | | |
| I127T/T130A/H188D | | | |
| H18R/R29D/Y31L/Q33H/K36G/ | 1420 | | |
| K37E/M38I/T41A/M43R/ | | | |
| M47T/L70Q/E81V/L85R/K89N/ | | | |
| A91T/F92P/K93V/R94L/I118V/ | | | |
| T120S/T130A/K169E/H188D | | | |
| R29D/Y31L/Q33H/K36G/M38I/ | 1421 | | |
| T41A/M43R/M47T/L70Q/ | | | |
| E81V/L85R/K89N/A91T/F92P/K93V/ | | | |
| R94L/I118V/T120S/I127T/ | | | |
| T130A/E143G/K169E/M174V/H188D | | | |
| R29D/I30V/Y31L/Q33H/K36G/ | 1422 | | |
| M38I/T41A/M43R/M47T/ | | | |
| E81V/L85R/K89N/A91T/F92P/ | | | |
| K93V/R94L/I118V/T120S/I127T/ | | | |
| T130A/H188D | | | |
| R29D/Y31L/Q33H/K36G/M38I/ | 1423 | | |
| T41A/M43R/M47T/E81V/ | | | |
| L85R/K89N/A91T/F92P/K93V/ | | | |
| R94L/I118V/T120S/I127T/ | | | |
| T130A/H188D | | | |
| R29D/Y31L/Q33H/K36G/M38I/ | 1424 | | |
| T41A/M43R/M47T/L70Q/ | | | |
| E81V/L85R/K89N/A91T/F92P/K93V/R94L/ | | | |
| I118V/T120S/I127T/T130A/K169E | | | |
| R29D/Y31L/Q33H/K36G/M38I/ | 1425 | | |
| T41A/M43R/M47T/L70Q/ | | | |
| E81V/K89N/A91T/F92P/K93V/ | | | |
| R94L/I118V/T120S/I127T/ | | | |
| T130A | | | |
| R29D/Y31L/Q33H/K36G/M38I/ | 1426 | | |
| T41A/M43R/M47T/L85R/ | | | |
| K89N/A91T/F92P/K93V/R94L/ | | | |
| I118V/T120S/I127T/T130A/ | | | |
| K169E/H188D | | | |
| R29D/Y31L/Q33H/K36G/M38I/ | 1427 | | |
| T41A/M43R/M47T/E81V/ | | | |
| L85R/K89N/A91T/F92P/K93V/ | | | |
| R94L/F108L/I118V/T120S/ | | | |
| T130A/K169E/H188D | | | |
| R29D/Y31L/Q33H/K36G/M38I/ | 1428 | | |
| T41A/M43R/M47T/L70Q/ | | | |
| E81V/L85R/K89N/A91T/F92P/ | | | |
| K93V/R94L/I118V/T120S/ | | | |
| T130A/N149D/K169E/H188D | | | |
| H18L/R29D/Y31L/Q33H/K36G/ | 1429 | | |
| M38I/T41A/M43R/M47T/ | | | |
| L70Q/E81V/L85R/K89N/ | | | |
| A91T/F92P/K93V/R94L/ | | | |
| I118V/T120S/T130A/K169E/H188D | | | |
| R29D/Y31L/Q33H/K36G/M38I/ | 1430 | | |
| T41A/M43R/M47T/E81V/ | | | |
| L85R/K89N/A91T/F92P/K93V/ | | | |
| R94L/I118V/T120S/I127T/ | | | |
| C128Y/T130A/H188D | | | |
| H18L/R29D/Y31L/Q33H/K36G/ | 1431 | | |
| M38I/T41A/M43R/M47T/ | | | |
| E81V/L85R/K89N/A91T/F92P/ | | | |
| K93V/R94L/E99D/T130A | | | |
| H18L/R29D/Y31L/Q33H/K36G/ | 1432 | | |
| M38I/T41A/M43R/M47T/ | | | |
| L70Q/E81V/L85R/K89N/ | | | |
| A91T/F92P/K93V/R94L/ | | | |
| I118V/T120S/T130A/K169E | | | |
| R29D/Y31L/Q33H/K36G/M38I/ | 1433 | | |
| T41A/M43R/M47T/I61N/ | | | |
| E81V/L85R/K89N/A91T/F92P/ | | | |
| K93V/R94F/V104A/ | | | |
| I118V/T120S/I126V/T130A | | | |
| R29D/Y31L/Q33H/K36G/M38I/ | 1434 | | |
| T41A/M43R/M47T/E81V/ | | | |
| L85R/K89N/A91T/F92P/K93V/ | | | |
| R94F/I118V/T120S/T130A | | | |
| R29D/Y31L/Q33H/K36G/M38I/ | 1435 | | |
| T41A/M43R/M47T/T62S/ | | | |
| E81V/L85R/K89N/A91T/ | | | |
| F92P/K93V/R94L/I118V/ | | | |
| T120S/T130A/K169E/T175A | | | |
| H18L/R29D/Y31L/Q33H/K36G/ | 1436 | | |
| M38I/T41A/M43R/M47T/ | | | |
| E81V/L85R/K89N/A91T/ | | | |
| F92P/K93V/R94L/I118V/ | | | |
| T120S/I127T/T130A/L142S/H188D | | | |
| C16S/H18L/R29D/Y31L/Q33H/ | 1437 | | |
| K36G/M38I/T41A/M43R/ | | | |
| M47T/E81V/L85R/K89N/ | | | |
| A91T/F92P/K93V/ | | | |
| R94L/T110A/I118V/H188D | | | |
| R29D/Y31L/Q33H/K36G/M38I/ | 1438 | | |
| T41A/M43R/M47T/A91G/ | | | |
| I118V/T120S/I127T/T130A/H188D | | | |
| R29D/Y31L/Q33H/K36G/M38I/ | 1439 | | |
| T41A/M43R/M47T/L70Q/ | | | |
| D76G/A91G/S103L/I118V/ | | | |
| T120S/I127T/T130A | | | |
| Y53C/L85R/K89N/A91T/F92P/ | 1440 | | |
| K93V/R94L/I118V/T120S/ | | | |
| I127T/T130A/K169E | | | |
| T62S/E81V/L85R/K89N/A91T/ | 1441 | | |
| F92P/K93V/R94L/I118V/ | | | |
| T120S/T130A/K169E | | | |
| Y53C/L70Q/D90G/T130A/ | 1442 | | |
| N149D/N152T/H188D | | | |
| H18L/R29D/Y31L/Q33H/K36G/ | 1443 | | |
| M38I/T41A/M43R/M47T/ | | | |
| E81V/L85R/K89N/A91T/F92P/K93V/R94L/ | | | |
| I118V/T120S/I127T/T130A/H188D | | | |
| H18L/R29D/Y31L/Q33H/K36G/ | 1444 | | |
| M38I/T41A/M43R/M47T/ | | | |
| E81V/L85R/K89N/A91T/F92P/ | | | |
| K93V/R94L/T130A/N149S | | | |
| I67T/L70Q/A91G/I118V/T120S/T130A | 1537 | 1538 | 1540 |
| S21P/L70Q/D90G/I118V/T120S/T130A | 1541 | 1542 | 1544 |

[0338] In some embodiments, the one or more amino acid modifications of a variant CD80 polypeptides provided herein produces at least one affinity-modified IgSF domain (e.g., IgV or IgC) or a specific binding fragment thereof relative to an IgSF domain contained in a wild-type or unmodified CD80 polypeptide such that the variant CD80 polypeptide exhibits altered (increased or decreased) binding activity or affinity for one or more binding partners, CTLA-4, PD-L1, or CD28, compared to a wild-type or unmodified CD80 polypeptide. The provided variant CD80 polypeptides containing at least one affinity-modified IgSF domain (e.g., IgV or IgC) or a specific binding fragment thereof exhibit altered (increased or decreased) binding activity or affinity for one or more cognate binding partners, CTLA-4, PD-L1, or CD28, compared to a wild-type or unmodified CD80 polypeptide. In some embodiments, a variant CD80 polypeptide has a binding affinity for CD28, PD-L1, or CTLA-4 that differs from that of a wild-type or unmodified CD80 polypeptide control sequence as determined by, for example, solid-phase ELISA immunoassays, flow cytometry or surface plasmon resonance (Biacore) assays. In some embodiments, the variant CD80 polypeptide has an increased binding affinity for CD28, PD-L1, and/or CTLA-4. In some embodiments, the variant CD80 polypeptide has an increased binding affinity for CTLA-4, and/or CD28. In some embodiments, the variant CD80 polypeptide has a decreased binding affinity for PD-L1, relative to a wild-type or unmodified CD80 polypeptide. The CD28, PD-L1 and/or the CTLA-4 can be a mammalian protein, such as a human protein or a murine protein.

[0339] Binding affinities for each of the binding partners are independent; that is, in some embodiments, a variant CD80 polypeptide has an altered binding affinity for one, two or three of CD28, PD-L1, and CTLA-4, relative to a wild-type or unmodified CD80 polypeptide. In some embodiments, a variant CD80 polypeptide has an increased binding affinity for one, two or three of CD28, PD-L1, and CTLA-4, relative to a wild-type or unmodified CD80 polypeptide. In some embodiments, a variant CD80 polypeptide has an increased binding affinity for one, two or three of CD28, PD-L1, and CTLA-4, and/or a decreased binding affinity for one, two or three of CD28, PD-L1, and CTLA-4, relative to a wild-type or unmodified CD80 polypeptide.

[0340] In some embodiments, the variant CD80 polypeptide has an increased binding affinity for CD28, relative to a wild-type or unmodified CD80 polypeptide. In some embodiments, the variant CD80 polypeptide has an increased binding affinity for PD-L1, relative to a wild-type or unmodified CD80 polypeptide. In some embodiments, the variant CD80 polypeptide has an increased binding affinity for CTLA-4, relative to a wild-type or unmodified CD80 polypeptide.

[0341] In some embodiments, the variant CD80 polypeptide has an increased binding affinity for PD-L1 and an increased binding affinity for CD28, relative to a wild-type or unmodified CD80 polypeptide. In some embodiments, the variant CD80 polypeptide has an increased binding affinity for CTLA-4 and an increased binding affinity for PD-L1, relative to a wild-type or unmodified CD80 polypeptide. In some embodiments, the variant CD80 polypeptide has an increased binding affinity for CD28 and an increased binding affinity for CTLA-4, relative to a wild-type or unmodified CD80 polypeptide. In some embodiments, the variant CD80 polypeptide has an increased binding affinity for CD28, PD-L1, and CTLA-4, relative to a wild-type or unmodified CD80 polypeptide.

[0342] In some embodiments, the variant CD80 polypeptide has a decreased binding affinity for PD-L1, relative to a wild-type or unmodified CD80 polypeptide.

[0343] In some embodiments, the variant CD80 polypeptide has an increased binding affinity for CTLA-4 and CD28, relative to a wild-type or unmodified CD80 polypeptide. In some embodiments, the variant CD80 polypeptide has a increased binding affinity for CTLA-4 and an decreased binding affinity for CD28, relative to a wild-type or unmodified CD80 polypeptide. In any of such embodiments, the variant CD80 polypeptide has a decreased binding affinity for PD-L1 and/or does not bind or substantially bind to PD-L1.

[0344] In some embodiments, a variant CD80 polypeptide with increased or greater binding affinity to CD28, PD-L1, and/or CTLA-4 will have an increase in binding affinity relative to the wild-type or unmodified CD80 polypeptide control of at least about 5%, such as at least about 10%, 15%, 20%, 25%, 35%, or 50% for the CD28, PD-L1, and/or CTLA-4 binding partner(s). In some embodiments, the increase in binding affinity relative to the wild-type or unmodified CD80 polypeptide is more than 1.2-fold, 1.5-fold, 2-fold, 3-fold, 4-fold, 5-fold, 6-fold, 7-fold, 8-fold, 9-fold, 10-fold, 20-fold, 30-fold, 40-fold, 50-fold, 100-fold, 150-fold, 200-fold, 250-fold, 300-fold, 350-fold, 400-fold, or more. In such examples, the wild-type or unmodified CD80 polypeptide has the same sequence as the variant CD80 polypeptide except that it does not contain the one or more amino acid modifications (e.g., substitutions).

[0345] In some embodiments, a variant CD80 polypeptide with decreased or reduced binding affinity to a cognate binding partner(s) will have decrease in binding affinity relative to the wild-type or unmodified CD80 polypeptide control of at least 5%, such as at least about 10%, 15%, 20%, 30%, 40%, 50%, 60%, 70%, 80%, 90% or more for the binding partner(s). In some embodiments, the decrease in binding affinity relative to the wild-type or unmodified CD80 polypeptide is more than 1.2-fold, 1.5-fold, 2-fold, 3-fold, 4-fold, 5-fold, 6-fold, 7-fold, 8-fold, 9-fold, 10-fold, 20-fold, 30-fold 40-fold or 50-fold. In such examples, the wild-type or unmodified CD80 polypeptide has the same sequence as the variant CD80 polypeptide except that it does not contain the one or more amino acid modifications (e.g., substitutions).

[0346] In some embodiments, the equilibrium dissociation constant (K_{d}) of any of the foregoing embodiments to CD28, PD-L1, and/or CTLA-4 can be at least at or about 1×10⁻⁵ M, 1×10⁻⁶ M, 1×10⁻⁷ M, 1×10⁻⁸ M, 1×10⁻⁹ M, 1×10⁻¹⁰ M or 1×10⁻¹¹ M, or 1×10⁻¹² M or less.

[0347] Non-limiting examples of CD80 variant polypeptides with altered (e.g. increased or decreased) binding to binding partners are described in the examples, including those in which the mutations are contained in the full extracellular domain containing the IgV and IgC domain. Exemplary binding activities for binding cognate binding partners are shown in a flow-cytometry based assay based on mean fluorescence intensity (MFI) and comparison of binding to the corresponding unmodified or wild-type CD80 polypeptide. Among such variant polypeptides are polypeptides that exhibit an increase or decrease for a cognate binding partner, such as CD28, CTLA-4 and/or PD-L1 as described.

[0348] In some embodiments, the provided variant CD80 polypeptides containing at least one affinity-modified IgSF domain (e.g., IgV or IgC) or a specific binding fragment thereof relative to an IgSF domain contained in a wild-type or unmodified CD80 polypeptide exhibit altered (increases/stimulates or decreases/inhibits) signaling induced by one or more functional binding partner(s), such as CD28, PD-L1, and/or CTLA-4, expressed on the surface of a cell capable of signaling, such as a T-cell capable of releasing cytokine in response to intracellular signal, compared to a wild-type or unmodified CD80 polypeptide upon binding the one or more binding partner(s). In some embodiments, the altered signaling differs from that effected by a wild-type or unmodified CD80 polypeptide control sequence, e.g. in the same format (e.g. soluble), as determined by, for example, an assay that measures cytokine release (e.g., IL-2 release or IFN-gamma release), following incubation with the specified variant and/or wild-type or unmodified CD80 polypeptide. An exemplary assay is described in Examples 8-9. In exemplary assays, the cytokine release is a function of the sum of the signaling activities of the functional binding partners expressed on the surface of the cytokine-releasing cell.

[0349] Because CTLA-4 induces inhibitory signaling, increased CTLA-4 signaling results in a decrease in cytokine release in some exemplary assays. Conversely, decreased CTLA-4 signaling results in decreased inhibitory signaling, which does not decrease cytokine release and can result in increased cytokine release in some assays. Because CD28 signaling stimulates cytokine release, increased CD28 signaling results in increased cytokine release in exemplary assays. Conversely, decreased CD28 signaling results in decreased cytokine release in exemplary assays. Because PD-L1 induces inhibitory signaling when bound to PD-1, increased PD-L1 signaling results in a decrease in cytokine release in some exemplary assays. Conversely, decreased PD-L1 signaling results in decreased inhibitory signaling, which does not decrease cytokine release and can result in increased cytokine release in some assays.

[0350] In some embodiments, the variant CD80 polypeptide increases CD28-mediated signaling, relative to a wild-type or unmodified CD80 polypeptide. In some embodiments, the variant CD80 polypeptide decreases PD-L1, and/or CTLA-4-mediated signaling, relative to a wild-type or unmodified CD80 polypeptide. In some embodiments, the variant CD80 polypeptide increases CD28-mediated signaling and decreases PD-L1, and/or CTLA-4-mediated signaling, relative to a wild-type or unmodified CD80 polypeptide.

[0351] Binding affinities for each of the cognate binding partners are independent; thus, in some embodiments, a variant CD80 polypeptide can increase the signaling induced by one, two or three of CD28, PD-L1, and CTLA-4, and/or a decrease the signaling induced by one, two or three of CD28, PD-L1, and CTLA-4, relative to a wild-type or unmodified CD80 polypeptide.

[0352] In some embodiments, the variant CD80 polypeptide increases the signaling induced by CD28, upon binding, relative to a wild-type or unmodified CD80 polypeptide. In some embodiments, the variant CD80 decreases the signaling induced by PD-L1/PD-1, relative to a wild-type or unmodified CD80 polypeptide. In some embodiments, the variant CD80 polypeptide decreases the signaling induced by CTLA-4, relative to a wild-type or unmodified CD80 polypeptide.

[0353] In some embodiments, the variant CD80 polypeptide decreases the signaling induced by CTLA-4, and increases the signaling induced by CD28, relative to a wild-type or unmodified CD80 polypeptide. In some embodiments, the variant CD80 polypeptide decreases the signaling induced by PD-L1 and increases the signaling induced by CD28, relative to a wild-type or unmodified CD80 polypeptide.

[0354] In some embodiments, a variant CD80 polypeptide that stimulates or increases the signaling induced by CD28 will produce a signal that is at least 105%, 110%, 120%, 150%, 200%, 300%, 400%, or 500%, or more of the signal induced by the wild-type or unmodified CD80 polypeptide. In some embodiments, the increase in CD28-mediated signaling relative to the wild-type or unmodified CD80 polypeptide is more than 1.2-fold, 1.5-fold, 2-fold, 3-fold, 4-fold, 5-fold, 6-fold, 7-fold, 8-fold, 9-fold, 10-fold, 20-fold, 30-fold, 40-fold, 50-fold, 100-fold, 150-fold, 200-fold, 250-fold, 300-fold, 350-fold, 400-fold, or more. In such examples, the wild-type or unmodified CD80 polypeptide has the same sequence as the variant CD80 polypeptide except that it does not contain the one or more amino acid modifications (e.g., substitutions).

[0355] In some embodiments, a variant CD80 polypeptide that inhibits or decreases the inhibitory signaling induced by CTLA-4 or PD-1/PD-L1 will produce a signal that is 90%, 85%, 80%, 75%, 70%, 65%, 60%, 55%, 50%, 45%, 40%, 35%, 30%, 25%, 20%, 15%, 10%, 5%, or less, of the signal induced by the wild-type or unmodified CD80 polypeptide. In such examples, the wild-type or unmodified CD80 polypeptide has the same sequence as the variant CD80 polypeptide except that it does not contain the one or more amino acid modifications (e.g., substitutions).

[0356] In some embodiments, a variant CD80 polypeptide that affects the inhibitory signaling induced by CTLA-4 and/or PD-L1, and/or affects the signaling by CD28 will yield a sum of the PD-L1, CTLA-4 and CD28 signaling that is greater than the sum of the PD-L1, CTLA-4 and CD28 signaling effected by the corresponding wild-type or unmodified CD80 polypeptide. In such embodiments, the sum of the PD-L1, CTLA-4 and CD28 signaling is at least 105%, 110%, 120%, 150%, 200%, 300%, 400%, or 500%, or more of the signal effected by the corresponding wild-type or unmodified CD80 polypeptide. In such examples, the corresponding wild-type or unmodified CD80 polypeptide has the same sequence as the variant CD80 polypeptide except that it does not contain the one or more amino acid modifications (e.g., substitutions).

[0357] Non-limiting examples of CD80 variant polypeptides with altered (e.g. increased or decreased) signaling induced following interactions with one or more functional binding partners, e.g. CD28, PD-L1, and/or CTLA-4, are described in the examples. Among provided CD80 variant polypeptides include those in which the mutations are contained in the full extracellular domain containing the IgV and IgC domain. Exemplary functional activities are shown in a reporter-based assay based on changed in fluorescence of a reporter in a T cell reporter Jurkat cell line, including in comparison to the corresponding unmodified or wild-type CD80 polypeptide. Among such variant polypeptides are polypeptides that exhibit an increase in CD28 costimulation or agonism as described. 1. CD28

[0358] In some embodiments, the variant CD80 polypeptide exhibits increased affinity for the ectodomain of CD28 compared to a wild-type or unmodified CD80 polypeptide. In some embodiments, the variant CD80 polypeptide exhibits increased affinity to the ectodomain of CD28 compared to a wildtype or unmodified CD80 polypeptide, such as comprising the sequence set forth in SEQ ID NO: 2, 76, 150, or 1245. In some embodiments, the increased affinity to the ectodomain of CD28 is increased more than 1.2-fold, 1.5-fold, 2-fold, 3-fold, 4-fold, 5-fold, 6-fold, 7-fold, 8-fold, 9-fold, 10-fold, 20-fold, 30-fold, 40-fold, 50-fold 60-fold, 70-fold, 80-fold, 90-fold, 100-fold, 150-fold, or 200-fold, compared to binding affinity of the unmodified CD80 for the ectodomain of CD28.

[0359] In some embodiments, the variant CD80 polypeptide exhibits increased affinity for the ectodomain of CD28 and the ectodomain of CTLA-4 compared to a wildtype or unmodified CD80 polypeptide, such as comprising the sequence set forth in SEQ ID NO: 2, 76, 150, or 1245. In some embodiments, the variant CD80 polypeptide exhibits increased affinity for the ectodomain of CD28 and the ectodomain of PD-L1 compared to a wildtype or unmodified CD80 polypeptide, such as comprising the sequence set forth in SEQ ID NO: 2, 76, 150, or 1245. In some embodiments, the variant CD80 polypeptide exhibits increased affinity for the ectodomain of CD28, the ectodomain of PD-L1 and the ectodomain of CTLA-4 compared to wild-type or an unmodified CD80 polypeptide, such as comprising the sequence set forth in SEQ ID NO: 2, 76, 150, or 1245. In some embodiments, the increased affinity to the ectodomain of CD28 and one or both of CTLA-4 and PD-L1 is independently increased more than 1.2-fold, 1.5-fold, 2-fold, 3-fold, 4-fold, 5-fold, 6-fold, 7-fold, 8-fold, 9-fold, 10-fold, 20-fold, 30-fold, 40-fold, 50-fold, 60-fold, 70-fold, 80-fold, 90-fold, 100-fold, 150-fold, 200-fold, 250-fold, 300-fold, 350-fold, 400-fold, or 450-fold compared to binding affinity of the unmodified CD80 for the ectodomain of CTLA-4 or PD-L1.

[0360] In some embodiments, the variant CD80 polypeptide exhibits increased affinity for the ectodomain of CD28 and the ectodomain of CTLA-4, compared to wild-type or unmodified CD80 polypeptide, such as comprising the sequence set forth in SEQ ID NO: 2, 76, 150, or 1245. In some embodiments, the variant CD80 polypeptide exhibits increased affinity for the ectodomain of CD28 and the ectodomain of PD-L1, compared to wild-type or unmodified CD80 polypeptide, such as comprising the sequence set forth in SEQ ID NO: 2, 76, 150, or 1245. In some embodiments, the variant CD80 polypeptide exhibits increased affinity for the ectodomain of CD28, the ectodomain of CTLA-4, and the ectodomain of PD-L1, compared to wild-type or unmodified CD80 polypeptide, such as comprising the sequence set forth in SEQ ID NO: 2, 76, 150, or 1245. In some embodiments, the increased affinity to the ectodomain of CD28 is increased more than 1.2-fold, 1.5-fold, 2-fold, 3-fold, 4-fold, 5-fold, 6-fold, 7-fold, 8-fold, 9-fold, 10-fold, 20-fold, 30-fold, 40-fold, 50-fold or 60-fold compared to binding affinity of the unmodified CD80 for the ectodomain of CD28.

[0361] Non-limiting examples of CD80 variant polypeptides with altered (e.g. increased binding to CD28 are described in the examples. Exemplary binding activities for binding CD28 are shown in a flow-cytometry based assay based on mean fluorescence intensity (MFI) and comparison of binding to the corresponding unmodified or wild-type CD80 polypeptide. Among such variant polypeptides are polypeptides that exhibit an increase binding for CD28, e.g. human CD28, as described. Further, non-limiting examples of CD80 variant polypeptides with altered (e.g. increased) signaling induced following interactions with one or more functional binding partners, e.g. CD28, are described in the examples. Exemplary functional activities are shown, in some aspects, in an mixed lymphocyte reaction and/or reporter-based assay based on changed in fluorescence of a reporter in a T cell reporter Jurkat cell line, including in comparison to the corresponding unmodified or wild-type CD80 polypeptide. Among such variant polypeptides are polypeptides that exhibit an increase in CD28 costimulation or agonism as described.

[0362] Among non-limiting examples of such variant polypeptide include, in some of these embodiments, the variant CD80 polypeptide that exhibits increased binding affinity for CD28 compared to a wild-type or unmodified CD80 polypeptide has one or more amino acid modifications (e.g., substitutions) corresponding to positions 12, 13, 18, 20, 22, 23, 24, 26, 27, 31, 35, 41, 42, 43, 46, 47, 54, 55, 57, 58, 61, 62, 67, 68, 69, 70, 71, 72, 79, 83, 84, 85, 88, 90, 93, 94, and/or 95 of SEQ ID NO: 2, 76, 150, or 1245. In some of these embodiments, the variant CD80 polypeptide that exhibits increased binding affinity for CD28 compared to a wild-type or unmodified CD80 polypeptide has one or more amino acid modifications (e.g., substitutions) corresponding to positions 23, 26, 35, 46, 55, 57, 58, 71, 79, and/or 84 of SEQ ID NO: 2, 76, 150, or 1245.

[0363] In some embodiments, the variant CD80 polypeptide has one or more amino acid substitutions selected from the group consisting of A12T, T13R, S15T, H18A, H18C, H18F, H18I, H18T, H18V, H18Y, V20I, S21P, V22A, V22D, V22L, E23D, E23G, E24D, A26D, A26E, A26G, A26H, A26K, A26N, A26P, A26Q, A26R, A26S, A26T, Q27H, Q27L, Q27R, Y31H, Q33R, E35D, E35G, K37E, M38I, T41S, M42V, M43I, M43L, D46E, D46N, D46V, M47I, M47L, M47V, M47Y, N48K, N48Y, Y53F, K54E, N55I, T57A, T57I, I58V, I61F, I61V, T62A, T62N, T62S, N64S, I67L, V68E, V68I, V68L, V68M, I69F, L70M, L70Q, L70R, A71D, A71G, L72P, L72V, 179I, T79M, V83I, V84I, L85M, L85Q, Y87C, Y87D, Y87N, E88D, E88V, D90G, D90N, D90P, A91G, A91S, K93E, K93R, R94L, R94Q, R94W, E95K, E95V, and L97Q. In some embodiments, the variant CD80 polypeptide has one or more amino acid substitutions selected from the group consisting of T13R, S15T, H18A, H18C, H18F, H18I, H18T, H18V, V20I, V22D, V22L, E23D, E23G, E24D, A26D, A26E, A26G, A26H, A26K, A26N, A26P, A26Q, A26R, A26S, A26T, Q27H, Q27L, Q33R, E35D, E35G, T41S, M42V, M43L, D46E, D46N, D46V, M47I, M47L, M47V, M47Y, N48K, N48Y, Y53F, K54E, N55I, T57A, T57I, I58V, I61F, I61V, T62A, T62N, I67L, V68E, V68I, V68L, I69F, L70M, A71D, A71G, L72V, 179I, T79M, V84I, L85M, L85Q, Y87C, Y87D, E88V, D90P, R94Q, R94W, E95V, L97Q.

[0364] In some embodiments, the one or more amino acid substitution is Q27H/T41S/A71D, V20I/M47V/T57I/V84I, V20I/M47V/A71D, A71D/L72V/E95K, V22L/E35G/A71D/L72P, E35D/A71D, E35D/I67L/A71D, Q27H/E35G/A71D/L72P/T79I, T13R/M42V/M47/A71D, E35D, E35D/M47I/L70M, E35D/A71D/L72V, E35D/M43L/L70M, A26P/E35D/M43I/L85Q/E88D, E35D/D46V/L85Q, Q27L/E35D/M47/T57I/L70Q/E88D, M47V/I69F/A71D/V83I, E35D/T57A/A71D/L85Q, H18Y/A26T/E35D/A71D/L85Q, E35D/M47L, E23D/M42V/M43I/I58V/L70R, V68M/L70M/A71D/E95K, N55I/T57I/I69F, E35D/M43I/A71D, T41S/T57I/L70R, H18Y/A71D/L72P/E88V, V20I/A71D, E23G/A26S/E35D/T62N/A71D/L72V/L85M, A12T/E24D/E35D/D46V/I61V/L72P/E95V, E35G/K54E/A71D/L72P, L70Q/A71D, A26E/E35D/M47L/L85Q, D46E/A71D, Y31H/E35D/T41S/V68L/K93R/R94W, V22A/E35D/V68E/A71D, E35D/D46E/M47V/V68M/D90G/K93E, E35D/N48K/L72V, D46V/M47I/A71G, M47I/A71G, E35D/M43I/M47L/L85M, E35D/M43I/D46E/A71G/L85M, H18Y/E35D/M47L/A71G/A91S, E35D/M47I/N48K/I61F, E35D/M47V/T62S/L85Q, M43I/M47L/A71G, E35D/M47V, E35D/M47L/A71G/L85M, V22A/E35D/M47L/A71G, E35D/M47L/A71G, E35D/D46E/M47I, Q27H/E35D/M47I, E35D/D46E/L85M, E35D/D46E/A91G, E35D/D46E, H18Y/E35D, Q27L/E35D/M47V/I61V/L85M, E35D/M47V/I61V/L85M, E35D/M47V/N48K/L85M, H18Y/E35D/M47V/N48K, A26E/Q27R/E35D/M47L/N48Y/L85Q, E35D/M47I/T62S/L85Q/E88D, E24D/Q27R/E35D/T41S/M47V/L85Q, S15T/H18Y/E35D/M47V/T62A/N64S/A71G/L85Q/D90N, E35D/M47L/V68M/A71G/L85Q/D90G, H18Y/E35D/M47I/V68M/A71G/R94L, H18Y/Y22A/E35D/T41S/M47V/T62N/A71G/A91G, E35D/D46E/M47I/T62A/V68M/L85M/Y87C, E35D/D46E/M47I/V68M/L85M, E35D/D46E/M47L/V68M/A71G/Y87C/K93R, E35D/D46E/M47L/V68M/T79M/L85M, E35D/D46E/M47V/V68M/L85Q, E35D/M43I/M47L/V68M, E35D/M47I/V68M/Y87N, E35D/M47L/Y53F/V68M/A71G/K93R/E95V, E35D/M47V/N48K/V68M/A71G/L85M, E35D/M47V/N48K/V68M/L85M, E35D/M47V/V68M/L85M, E35D/M47V/V68M/L85M/Y87D, E35D/T41S/D46E/M47I/V68M/K93R/E95V, H18Y/E35D/D46E/M47I/V68M/R94L, H18Y/E35D/D46E/M47I/V68M/R94L, H18Y/E35D/M47I/V68M/Y87N, H18Y/E35D/M47I/V68M/Y87N, H18Y/E35D/M47L/V68M/A71G/L85M, H18Y/E35D/M47L/V68M/A71G/L85M, H18Y/E35D/M47L/V68M/E95V/L97Q, H18Y/E35D/M47L/Y53F/V68M/A71G, H18Y/E35D/M47L/Y53F/V68M/A71G/K93R/E95V, H18Y/E35D/M47L/Y53F/V68M/A71G/K93R/E95V, H18Y/E35D/M47V/V68M/L85M, H18Y/E35D/M47V/V68M/L85M, H18Y/E35D/V68M/A71G/R94Q/E95V, H18Y/E35D/V68M/L85M/R94Q, H18Y/E35D/V68M/T79M/L85M, H18Y/V22D/E35D/M47V/N48K/V68M, S21P/E35D/K37E/D46E/M47I/V68M, S21P/E35D/K37E/D46E/M47I/V68M/R94L, T13R/Q33R/E35D/M38I/M47L/V68M/E95V/L97Q, T13R/Q33R/E35D/M47L/V68M/L85M, V22D/E24D/E35D/M47L/V68M, V22D/E24D/E35D/M47L/V68M/L85M/D90G, V22D/E24D/E35D/M47V/V68M, H18Y/E35D/M47V/V68M/A71G, H18C/A26P/E35D/M47L/V68M/A71G, H18I/A26P/E35D/M47V/V68M/A71G, H18L/A26N/D46E/V68M/A71G/D90G, H18L/E35D/M47V/V68M/A71G/D90G, H18T/A26N/E35D/M47L/V68M/A71G, H18V/A26K/E35D/M47L/V68M/A71G, H18V/A26N/E35D/M47V/V68M/A71G, H18V/A26P/E35D/M47V/V68L/A71G, H18V/A26P/E35D/M47L/V68M/A71G, H18V/E35D/M47V/V68M/A71G/D90G, H18Y/A26P/E35D/M47U/V68M/A71G, H18Y/A26P/E35D/M47V/V68M/A71G, H18Y/E35D/M47V/V68L/A71G/D90G, H18Y/E35D/M47V/V68M/A71G/D90G, A26P/E35D/M47I/V68M/A71G/D90G, H18V/A26G/E35D/M47V/V68M/A71G/D90G, H18V/A26S/E35D/M47L/V68M/A71G/D90G, H18V/A26R/E35D/M47L/V68M/A71G/D90G, H18V/A26D/E35D/M47V/V68M/A71G/D90G, H18V/A26Q/E35D/M47V/V68L/A71G/D90G, H18A/A26P/E35D/M47L/V68M/A71G/D90G, H18A/A26N/E35D/M47L/V68M/A71G/D90G, H18F/A26P/E35D/M47I/V68M/A71G/D90G, H18F/A26H/E35D/M47L/V68M/A71G/D90G, H18F/A26N/E35D/M47V/V68M/A71G/D90K, H18Y/A26P/E35D/M47V/V68U/A71G/D90G, H18Y/A26Q/E35D/M47T/V68M/A71G/D90G, H18R/A26P/E35D/D46N/M47V/V68M/A71G/D90P, or H18F/A26D/E35D/D46E/M47T/V68M/A71G/D90G.

[0365] 2. PD-L1

[0366] In some embodiments, the variant CD80 polypeptide exhibits increased affinity to PD-L1 compared to the wild-type or unmodified CD80 polypeptide. In some embodiments, the variant CD80 polypeptide exhibits increased affinity for the ectodomain of PD-L1 compared to wild-type or an unmodified CD80 polypeptide, such as comprising the sequence set forth in SEQ ID NO: 2, 76, 150, or 1245. In some embodiments, the increased affinity to the ectodomain of PD-L1 is increased more than 1.2-fold, 1.5-fold, 2-fold, 3-fold, 4-fold, 5-fold, 6-fold, 7-fold, 8-fold, 9-fold, 10-fold, 20-fold, 30-fold, 40-fold, 50-fold, 60-fold, 70-fold, 80-fold, 90-fold, 100-fold, 150-fold, 200-fold, 250-fold, 300-fold, 350-fold, 400-fold, or 450-fold compared to binding affinity of the unmodified CD80 for the ectodomain of PD-L1.

[0367] In some embodiments, the variant CD80 polypeptide exhibits increased affinity for the ectodomain of PD-L1, and increased affinity for the ectodomain of CTLA-4, compared to wild-type or unmodified CD80 polypeptide, such as comprising the sequence set forth in SEQ ID NO: 2, 76, 150, or 1245. In some embodiments, the variant CD80 polypeptide exhibits increased affinity for the ectodomain of PD-L1, and increased affinity for the ectodomain of CD28, compared to wild-type or unmodified CD80 polypeptide, such as comprising the sequence set forth in SEQ ID NO: 2, 76, 150, or 1245. In some embodiments, the variant CD80 polypeptide exhibits increased affinity for the ectodomain of PD-L1, and increased affinity for the ectodomain of CD28, and increased affinity for the ectodomain of CTLA-4, compared to wild-type or unmodified CD80 polypeptide, such as comprising the sequence set forth in SEQ ID NO: 2, 76, 150, or 1245. In some embodiments, the increased affinity to the ectodomain of PD-L1 is increased more than 1.2-fold, 1.5-fold, 2-fold, 3-fold, 4-fold, 5-fold, 6-fold, 7-fold, 8-fold, 9-fold, 10-fold, 20-fold, 30-fold, 40-fold, 50-fold or 60-fold compared to binding affinity of the unmodified CD80 for the ectodomain of PD-L1.

[0368] Non-limiting examples of CD80 variant polypeptides with altered (e.g. increased) binding to PD-L1 are described in the examples. Exemplary binding activities for binding PD-L1 are shown in a flow-cytometry based assay based on mean fluorescence intensity (MFI) and comparison of binding to the corresponding unmodified or wild-type CD80 polypeptide. Among such variant polypeptides are polypeptides that exhibit an increase binding for PD-L1, e.g. human PD-L1, as described. Further, non-limiting examples of CD80 variant polypeptides with altered (e.g. increased) signaling induced following interactions with one or more functional binding partners, e.g. PD-L1, are described in the examples. Exemplary functional activities are shown, in some aspects, in an mixed lymphocyte reaction and/or reporter-based assay based on changed in fluorescence of a reporter in a T cell reporter Jurkat cell line, including in comparison to the corresponding unmodified or wild-type CD80 polypeptide. Among such variant polypeptides are polypeptides that exhibit an increase in PD-L1-dependent CD28 costimulation or agonism as described.

[0369] Among non-limiting examples of such variant polypeptide include, in some of these embodiments, the variant CD80 polypeptide that exhibits increased binding affinity for PD-L1 compared to a wild-type or unmodified CD80 polypeptide has one or more amino acid modifications (e.g., substitutions) corresponding to positions 7, 12, 13, 15, 16, 18, 20, 22, 23, 24, 25, 26, 27, 28, 29, 30, 31, 33, 34, 35, 36, 37, 38, 41, 42, 43, 44, 46, 47, 48, 51, 53, 54, 55, 57, 58, 61, 62, 63, 65, 67, 68, 69, 70, 71, 72, 73, 74, 76, 77, 78, 79, 81, 82, 83, 84, 85, 86, 87, 88, 89, 90, 91, 92, 93, 94, 95, and/or 97 of SEQ ID NO: 2, 76, 150, or 1245. In some of these embodiments, the variant CD80 polypeptide that exhibits increased binding affinity for PD-L1 compared to a wild-type or unmodified CD80 polypeptide has one or more amino acid modifications (e.g., substitutions) corresponding to positions 7, 23, 26, 30, 34, 35, 46, 51, 55, 57, 58, 65, 71, 73, 78, 79, 82, and/or 84, of SEQ ID NO: 2, 76, 150, or 1245.

[0370] In some embodiments, the variant CD80 polypeptide has one or more amino acid substitutions selected from the group consisting of E7D, A12V, T13A, T13R, S15P, S15T, C16R, H18A, H18C, H18F, H18I, H18T, H18V, H18L, H18Y, V20A, V20I, S21P, V22A, V22D, V22I, V22L, E23D, E23G, E24D, L25S, A26D, A26E, A26G, A26H, A26K, A26N, A26P, A26Q, A26R, A26S, A26T, Q27H, Q27L, Q27R, R29C, T28Y, R29H, I30T, I30V, Y31H, Y31S, Q33E, Q33H, Q33K, Q33L, Q33R, K34E, E35D, K36R, K37E, M38I, M38T, M38V, T41A, T41S, M42I, M42V, M43I, M43L, M43T, M43V, S44P, D46E, D46N, D46V, M47F, M47I, M47L, M47T, M47V, N48D, N48H, N48K, N48R, N48S, N48T, N48Y, P51A, Y53F, Y53H, K54R, N55D, N55I, T57I, I58V, I61F, I61N, I61V, T62A, T62N, T62S, N63D, N64S, L65P, I67L, I67T, V68A, V68I, V68L, V68M, I69F, L70M, L70P, L70Q, L70R, A71D, A71G, L72P, L72V, R73S, P74S, D76H, E77A, G78A, T79A, T79I, T79L, T79M, T79P, E81G, E81K, C82R, V83A, V83I, V84A, V84I, L85E, L85M, L85Q, K86E, K86M, Y87C, Y87D, Y87H, Y87N, Y87Q, E88D, E88G, K89E, K89N, D90G, D90N, D90P, A91G, A91S, A91T, A91V, F92L, F92S, F92V, F92Y, K93E, K93R, K93T, R94L, R94Q, R94W, E95D, E95K, E95V, L97M, L97Q, and L97R. In some embodiments, the variant CD80 polypeptide has one or more amino acid substitutions selected from the group consisting of E7D, T13A, T13R, S15T, C16R, H18A, H18C, H18F, H18I, H18T, H18V, V20A, V20I, V22D, V22I, V22L, E23D, E23G, E24D, L25S, A26D, A26E, A26G, A26H, A26K, A26N, A26P, A26Q, A26R, A26S, A26T, Q27H, Q27L, 130T, I30V, Q33E, Q33K, Q33L, Q33R, K34E, E35D, K36R, T41S, M42I, M42V, M43L, M43T, D46E, D46N, D46V, M47F, M47I, M47L, M47V, N48D, N48H, N48K, N48R, N48S, N48T, N48Y, P51A, Y53F, K54R, N55D, N55I, T57I, I58V, I61F, I61V, T62A, T62N, L65P, I67L, V68I, V68L, I69F, L70M, A71D, A71G, L72V, R73S, P74S, D76H, G78A, T79A, T79I, T79L, T79M, T79P, E81G, E81K, C82R, V84A, V84I, L85E, L85M, L85Q, K86M, Y87C, Y87D, D90P, F92S, F92V, R94Q, R94W, E95D, E95V, L97M, and L97Q.

[0371] In some embodiments, the one or more amino acid substitution is Q27H/T41S/A71D, I30T/L70R, T13R/C16R/L70Q/A71D, T57I, M43I/C82R, V22L/M38V/M47T/A71D/L85M, I30V/T57I/L70P/A71D/A91T, V22I/L70M/A71D, N55D/K86M, L72P/T79I, L70P/F92S, T79P, E35D/M47I/L65P/D90N, L25S/E35D/M47I/D90N, S44P/167T/P74S/E81G/E95D, A71D, T13A/I61N/A71D, E81K, A12V/M47V/L70M, K34E/T41A/L72V, T41S/A71D/V84A, E35D/A71D, E35D/M47I, K36R/G78A, Q33E/T41A, M47V/N48H, M47L/V68A, S44P/A71D, Q27H/M43I/A71D/R73S, E35D/T57I/L70Q/A71D, M47I/E88D, M42I/I61V/A71D, P51A/A71D, H18Y/M47I/T57I/A71G, V20I/M47V/T57I/V84I, V20I/M47V/A71D, A71D/L72V/E95K, E35D/A71D, E35D/I67L/A71D, T13R/M42V/M47I/A71D, E35D, E35D/M47I/L70M, E35D/A71D/L72V, E35D/M43L/L70M, A26P/E35D/M43I/L85Q/E88D, E35D/D46V/L85Q, M47V/I69F/A71D/V83I, H18Y/A26T/E35D/A71D/L85Q, E35D/M47L, E23D/M42V/M43I/I58V/L70R, V68M/L70M/A71D/E95K, N55I/T57I/I69F, E35D/M43I/A71D, T41S/T57I/L70R, V20I/A71D, E23G/A26S/E35D/T62N/A71D/L72V/L85M, V22L/E35D/M43L/A71G/D76H, A26E/E35D/M47L/L85Q, D46E/A71D, Y31H/E35D/T41S/V68L/K93R/R94W, A26E/Q33R/E35D/M47L/L85Q/K86E, A26E/Q33R/E35D/M47L/L85Q, E35D/M47L/L85Q, A26E/Q33L/E35D/M47L/L85Q, A26E/Q33L/E35D/M47L, H18Y/A26E/Q33L/E35D/M47L/L85Q, Q33L/E35D/M47I, H18Y/Q33L/E35D/M47I, Q33L/E35D/D46E/M47I, Q33R/E35D/D46E/M47I, H18Y/E35D/M47L, Q33L/E35D/M47V, Q33L/E35D/M47V/T79A, Q33L/E35D/T41S/M47V, Q33L/E35D/M47I/L85Q, Q33L/E35D/M47I/T62N/L85Q, Q33L/E35D/M47V/L85Q, A26E/E35D/M43T/M47L/L85Q/R94Q, Q33R/E35D/K37E/M47V/L85Q, V22A/E23D/Q33L/E35D/M47V, E24D/Q33L/E35D/M47V/K54R/L85Q, S15P/Q33L/E35D/M47L/L85Q, E7D/E35D/M47I/L97Q, Q33L/E35D/T41S/M43I, E35D/M47I/K54R/L85E, Q33K/E35D/D46V/L85Q, Y31S/E35D/M47L/T79L/E88G, H18L/V22A/E35D/M47L/N48T/L85Q, Q27H/E35D/M47L/L85Q/R94Q/E95K, Q33K/E35D/M47V/K89E/K93R, E35D/M47I/E77A/L85Q/R94W, A26E/E35D/M43I/M47L/L85Q/K86E/R94W, Q27H/Q33L/E35D/M47V/N55D/L85Q/K89N, H18Y/V20A/Q33L/E35D/M47V/V53F, Q33L/E35D/M47L/A71G/F92S, V22A/R29H/E35D/D46E/M47I, Q33L/E35D/M43I/L85Q/R94W, H18Y/E35D/V68M/L97Q, Q33L/E35D/M47L/V68M/L85Q/E88D, Q33L/E35D/M43V/M47I/A71G, E35D/M47L/A71G/L97Q, E35D/M47V/A71G/L85M/L97Q, H18Y/Y31H/E35D/M47V/A71G/L85Q, E35D/D46E/M47V/L97Q, E35D/D46V/M47I/A71G/F92V, E35D/M47V/T62A/A71G/V83A/Y87H/L97M, Q33L/E35D/N48K/L85Q/L97Q, E35D/L85Q/K93T/E95V/L97Q, E35D/M47V/N48K/V68M/K89N, Q33L/E35D/M47I/N48D/A71G, Q27H/E35D/M47I/L85Q/D90G, E35D/M47I/L85Q/D90G, E35D/M47I/T62S/L85Q, A26E/E35D/M47L/A71G, E35D/M47I/Y87Q/K89E, V22A/E35D/M47I/Y87N, H18Y/A26E/E35D/M47L/L85Q/D90G, E35D/M47L/A71G/L85Q, E35D/M47V/A71G/E88D, E35D/A71G, E35D/M47V/A71G, I30V/E35D/M47V/A71G/A91V, V22D/E35D/M47L/L85Q, H18Y/E35D/N48K, E35D/T41S/M47V/A71G/K89N, E35D/M47V/N48T/L85Q, E35D/D46E/M47V/A71D/D90G, E35D/T41S/M43I/A71G/D90G, E35D/T41S/M43I/M47V/A71G, E35D/T41S/M43I/M47L/A71G, H18Y/Y22A/E35D/M47V/T62S/A71G, H18Y/A26E/E35D/M47L/V68M/A71G/D90G, E35D/K37E/M47V/N48D/L85Q/D90N, Q27H/E35D/D46V/M47L/A71G, V22L/Q27H/E35D/M47I/A71G, E35D/D46V/M47L/V68M/L85Q/E88D, E35D/T41S/M43V/M47I/L70M/A71G, E35D/D46E/M47V/N63D/L85Q, E35D/D46E/M47V/V68M/D90G/K93E, E35D/M43I/M47V/K89N, E35D/M47L/A71G/L85M/F92Y, V22D/E35D/M47L/L70M/L97Q, E35D/T41S/M47V/L97Q, E35D/Y53H/A71G/D90G/L97R, Q33L/E35D/M43U/Y53F/T62S/L85Q, E35D/M38T/D46E/M47V/N48S, Q33R/E35D/M47V/N48K/L85M/F92L, E35D/M38T/M43V/M47V/N48R/L85Q, T28Y/Q33H/E35D/D46V/M47U/A71G, E35D/N48K/L72V, E35D/T41S/N48T, D46V/M47I/A71G, M47I/A71G, E35D/M43I/M47L/L85M, E35D/M43I/D46E/A71G/L85M, H18Y/E35D/M47L/A71G/A91S, E35D/M47I/N48K/I61F, E35D/M47V/T62S/L85Q, M43I/M47L/A71G, E35D/M47V, E35D/M47L/A71G/L85M, V22A/E35D/M47L/A71G, E35D/M47L/A71G, E35D/D46E/M47I, Q27H/E35D/M47I, E35D/D46E/L85M, E35D/D46E/A91G, E35D/D46E, E35D/L97R, H18Y/E35D, Q27L/E35D/M47V/I61V/L85M, E35D/M47V/I61V/L85M, E35D/M47V/L85M/R94Q, E35D/M47V/N48K/L85M, H18Y/E35D/M47V/N48K, A26E/Q27R/E35D/M47L/N48Y/L85Q, E35D/D46E/M47L/V68M/L85Q/F92L, E35D/M47I/T62S/L85Q/E88D, E24D/Q27R/E35D/T41S/M47V/L85Q, S15T/H18Y/E35D/M47V/T62A/N64S/A71G/L85Q/D90N, E35D/M47L/V68M/A71G/L85Q/D90G, H18Y/E35D/M47I/V68M/A71G/R94L, Q33R/M47V/T62N/A71G, H18Y/Y22A/E35D/T41S/M47V/T62N/A71G/A91G, E24D/E35D/M47L/V68M/E95V/L97Q, E35D/D46E/M47I/T62A/V68M/L85M/Y87C, E35D/D46E/M47I/V68M/L85M, E35D/D46E/M47L/V68M/A71G/Y87C/K93R, E35D/D46E/M47L/V68M/T79M/L85M, E35D/D46E/M47L/V68M/T79M/L85M/L97Q, E35D/D46E/M47V/V68M/L85Q, E35D/M43I/M47L/V68M, E35D/M47I/V68M/Y87N, E35D/M47L/V68M/E95V/L97Q, E35D/M47L/Y53F/V68M/A71G/K93R/E95V, E35D/M47V/N48K/V68M/A71G/L85M, E35D/M47V/N48K/V68M/L85M, E35D/M47V/V68M/L85M, E35D/M47V/V68M/L85M/Y87D, E35D/T41S/D46E/M47I/V68M/K93R/E95V, H18Y/E35D/D46E/M47I/V68M/R94L, H18Y/E35D/D46E/M47I/V68M/R94L, H18Y/E35D/M38I/M47L/V68M/L85M, H18Y/E35D/M47I/V68M/Y87N, H18Y/E35D/M47I/V68M/Y87N, H18Y/E35D/M47L/V68M/A71G/L85M, H18Y/E35D/M47L/V68M/A71G/L85M, H18Y/E35D/M47L/V68M/E95V/L97Q, H18Y/E35D/M47L/V68M/E95V/L97Q, H18Y/E35D/M47L/Y53F/V68M/A71G, H18Y/E35D/M47L/Y53F/V68M/A71G, H18Y/E35D/M47L/Y53F/V68M/A71G/K93R/E95V, H18Y/E35D/M47L/Y53F/V68M/A71G/K93R/E95V, H18Y/E35D/M47V/V68M/L85M, H18Y/E35D/M47V/V68M/L85M, H18Y/E35D/V68M/A71G/R94Q/E95V, H18Y/E35D/V68M/A71G/R94Q/E95V, H18Y/E35D/V68M/L85M/R94Q, H18Y/E35D/V68M/L85M/R94Q, H18Y/E35D/V68M/T79M/L85M, H18Y/V22D/E35D/M47V/N48K/V68M, Q27L/Q33L/E35D/T41S/M47V/N48K/V68M/L85M, Q33L/E35D/M47V/T62S/V68M/L85M, Q33R/E35D/M38I/M47L/V68M, R29C/E35D/M47L/V68M/A71G/L85M, S21P/E35D/K37E/D46E/M47I/V68M, S21P/E35D/K37E/D46E/M47I/V68M/R94L, T13R/E35D/M47L/V68M, T13R/Q27L/Q33L/E35D/T41S/M47V/N48K/V68M/L85M, T13R/Q33L/E35D/M47L/V68M/L85M, T13R/Q33L/E35D/M47V/T62S/V68M/L85M, T13R/Q33R/E35D/M38I/M47L/V68M, T13R/Q33R/E35D/M38I/M47L/V68M/E95V/L97Q, T13R/Q33R/E35D/M38I/M47L/V68M/L85M, T13R/Q33R/E35D/M38I/M47L/V68M/L85M/R94Q, T13R/Q33R/E35D/M47L/V68M, T13R/Q33R/E35D/M47L/V68M/L85M, V22D/E24D/E35D/M47L/V68M, V22D/E24D/E35D/M47L/V68M/L85M/D90G, V22D/E24D/E35D/M47V/V68M, H18Y/E35D/M47V/V68M/A71G, H18C/A26P/E35D/M47L/V68M/A71G, H18I/A26P/E35D/M47V/V68M/A71G, H18L/A26N/D46E/V68M/A71G/D90G, H18L/E35D/M47V/V68M/A71G/D90G, H18T/A26N/E35D/M47L/V68M/A71G, H18V/A26K/E35D/M47L/V68M/A71G, H18V/A26N/E35D/M47V/V68M/A71G, H18V/A26P/E35D/M47V/V68L/A71G, H18V/A26P/E35D/M47L/V68M/A71G, H18V/E35D/M47V/V68M/A71G/D90G, H18Y/A26P/E35D/M47I/V68M/A71G, H18Y/A26P/E35D/M47V/V68M/A71G, H18Y/E35D/M47V/V68L/A71G/D90G, H18Y/E35D/M47V/V68M/A71G/D90G, A26P/E35D/M47I/V68M/A71G/D90G, H18V/A26G/E35D/M47V/V68M/A71G/D90G, H18V/A26S/E35D/M47L/V68M/A71G/D90G, H18V/A26R/E35D/M47L/V68M/A71G/D90G, H18V/A26D/E35D/M47V/V68M/A71G/D90G, H18V/A26Q/E35D/M47V/V68L/A71G/D90G, H18A/A26P/E35D/M47L/V68M/A71G/D90G, H18A/A26N/E35D/M47L/V68M/A71G/D90G, H18F/A26P/E35D/M47I/V68M/A71G/D90G, H18F/A26H/E35D/M47L/V68M/A71G/D90G, H18F/A26N/E35D/M47V/V68M/A71G/D90K, H18Y/A26N/E35D/M47F/V68M/A71G/D90G, H18Y/A26P/E35D/M47V/V68U/A71G/D90G, H18Y/A26Q/E35D/M47T/V68M/A71G/D90G, H18R/A26P/E35D/D46N/M47V/V68M/A71G/D90P, or H18F/A26D/E35D/D46E/M47T/V68M/A71G/D90G.

[0372] In some embodiments, the variant CD80 polypeptides provided herein, that exhibit increased affinity for the ectodomain of PD-L1, compared to a wild-type or unmodified CD80 polypeptide, results in decreased inhibitory signal from the binding of PD-L1 an PD-1. In some embodiments, a variant CD80 polypeptide that inhibits or decreases the inhibitory signaling induced by PD-L1 and PD-1 will produce a signal that is 90%, 85%, 80%, 75%, 70%, 65%, 60%, 55%, 50%, 45%, 40%, 35%, 30%, 25%, 20%, 15%, 10%, 5%, or less, of the PD-L1/PD-1 signal in the presence of the wild-type or unmodified CD80 polypeptide. In such examples, the wild-type or unmodified CD80 polypeptide has the same sequence as the variant CD80 polypeptide except that it does not contain the one or more amino acid modifications (e.g., substitutions).

[0373] In some embodiments, the variant CD80 polypeptides provided herein, that exhibit increased affinity for the ectodomain of PD-L1, compared to a wild-type or unmodified CD80 polypeptide, can exhibit PD-L1-dependent CD28 costimulation or can effect PD-L1-dependent CD28 costimulatory activity. In some embodiments, wherein a variant CD80 polypeptide mediates or effects PD-L1-dependent CD28 costimulatory activity, the affinity of the variant CD80 polypeptide is increased at least 1.2-fold, 1.5-fold, 2-fold, 3-fold, 4-fold, 5-fold, 6-fold, 7-fold, 8-fold, 9-fold, 10-fold, 20-fold, 30-fold, 40-fold, 50-fold 60-fold, 70-fold, 80-fold, 90-fold, 100-fold, 150-fold, 200-fold, 250-fold, 300-fold, 350-fold, 400-fold, or 450-fold compared to binding affinity of the unmodified CD80 for the ectodomain of PD-L1.

[0374] In some embodiments, the variant CD80 polypeptides provided herein that exhibit, mediate, or effect PD-L1-dependent CD28 costimulatory activity, retain binding to the ectodomain of CD28 compared to a wild-type or unmodified CD80. For example the variant CD80 polypeptide can retain at least or about at least 2%, 3%, 4%, 5%, 6%, 7%, 8,%, 9%, 10%, 12%, 15%, 20%, 25%, 30%, 35%, 40%, 50%, 55%, 60%, 65%, 70% 75%, 80%, 85%, 90%, or 95% of the affinity to the ectodomain of CD28, compared to the binding affinity of the unmodified CD80 polypeptide for the ectodomain of CD28.

[0375] In some embodiments, the variant CD80 polypeptides provided herein that exhibit, mediate, or effect PD-L1-dependent CD28 costimulatory activity exhibit increased affinity to the ectodomain of CD28, compared to the binding affinity of the unmodified CD80 for the ectodomain of CD28. For example, the variant CD80 polypeptide can exhibit increased affinity to the ectodomain of CD28 that is increased more than 1.2-fold, 1.5-fold, 2-fold, 3-fold, 4-fold, 5-fold, 6-fold, 7-fold, 8-fold, 9-fold, 10-fold, 20-fold, 30-fold, 40-fold, 50-fold, 60-fold, 70-fold, 80-fold, 90-fold, 100-fold, 150-fold, or 200-fold, compared to binding affinity of the unmodified CD80 for the ectodomain of CD28. 3. CTLA-4

[0376] In some embodiments, the variant CD80 polypeptide exhibits increased affinity for the ectodomain of CTLA-4 compared to a wild-type or unmodified CD80 polypeptide, such as a wildtype or unmodified CD80 polypeptide, comprising the sequence set forth in SEQ ID NO: 2, 76, 150, or 1245. In some embodiments, the increased affinity to the ectodomain of CTLA-4 is increased more than 1.2-fold, 1.5-fold, 2-fold, 3-fold, 4-fold, 5-fold, 6-fold, 7-fold, 8-fold, 9-fold, 10-fold, 20-fold, 30-fold, 40-fold, 50-fold or 60-fold compared to binding affinity of the unmodified CD80 for the ectodomain of CTLA-4.

[0377] Non-limiting examples of CD80 variant polypeptides with altered (e.g. increased) binding to CTLA-4 are described in the examples. Exemplary binding activities for binding CTLA-4 are shown in a flow-cytometry based assay based on mean fluorescence intensity (MFI) and comparison of binding to the corresponding unmodified or wild-type CD80 polypeptide. Among such variant polypeptides are polypeptides that exhibit an increase binding for CTLA-4, e.g. human CTLA-4, as described. Further, non-limiting examples of CD80 variant polypeptides with altered (e.g. increased) signaling induced following interactions with one or more functional binding partners, e.g. CTLA-4, are described in the examples. Exemplary functional activities are shown, in some aspects, in an mixed lymphocyte reaction and/or reporter-based assay based on changed in fluorescence of a reporter in a T cell reporter Jurkat cell line, including in comparison to the corresponding unmodified or wild-type CD80 polypeptide.

[0378] Among non-limiting examples of such variant polypeptide include, in some of these embodiments, the variant CD80 polypeptide that exhibits increased binding affinity for CTLA-4 compared to a wild-type or unmodified CD80 polypeptide has one or more amino acid modifications (e.g., substitutions) corresponding to positions 7, 12, 13, 16, 18, 20, 22, 23, 24, 26, 27, 30, 33, 35, 37, 38, 41, 42, 43, 44, 46, 47, 48, 52, 53, 54, 57, 58, 61, 62, 63, 67, 68, 69, 70, 71, 72, 73, 74, 77, 79, 81, 83, 84, 85, 87, 88, 89, 90, 91, 92, 93, 94, 95, and/or 97 of SEQ ID NO: 2, 76, 150, or 1245. In some of these embodiments, the variant CD80 polypeptide that exhibits increased binding affinity for CTLA-4 compared to a wild-type or unmodified CD80 polypeptide has one or more amino acid modifications (e.g., substitutions) corresponding to positions 7, 23, 26, 30, 35, 46, 57, 58, 71, 73, 79, and/or 84 of SEQ ID NO: 2, 76, 150, or 1245.

[0379] In some embodiments, the variant CD80 polypeptide has one or more amino acid substitutions selected from the group consisting of E7D, A12T, T13A, T13R, S15T, C16R, H18A, H18C, H18F, H18I, H18L, H18T, H18V, H18Y, V20I, S21P, V22A, V22D, V22L, E23D, E23G, E24D, A26D, A26E, A26G, A26H, A26K, A26N, A26P, A26Q, A26R, A26S, A26T, Q27H, Q27L, Q27R, I30V, Q33L, Q33R, E35D, E35G, K37E, M38I, M38T, M38V, T41S, M42V, M43I, M43L, M43T, M43V, S44P, D46E, D46N, D46V, M47I, M47L, M47T, M47V, M47Y, N48D, N48H, N48K, N48R, N48S, N48T, N48Y, E52D, Y53F, Y53H, K54E, K54R, T57A, T57I, I58V, I61F, I61N, I61V, T62A, T62N, T62S, N63D, N64S, I67L, I67T, V68E, V68I, V68L, V68M, I69F, L70M, L70Q, L70R, A71D, A71G, L72P, L72V, R73H, P4S, E77A, T79I, T79M, E81G, E81K, V83I, V84I, L85M, L85Q, Y87C, Y87D, Y87N, E88D, E88V, K89N, D90G, D90N, D90P, A91G, A91S, A91V, F92V, F92Y, K93E, K93R, K93T, R94L, R94Q, R94W, E95D, E95K, E95V, L97Q, and L97R. In some embodiments, the variant CD80 polypeptide has one or more amino acid substitutions selected from the group consisting of E7D, T13A, T13R, S15T, C16R, H18A, H18C, H18F, H18I, H18T, H18V, V20I, V22D, V22L, E23D, E23G, E24D, A26D, A26E, A26G, A26H, A26K, A26N, A26P, A26Q, A26R, A26S, A26T, Q27H, Q27L, I30V, Q33L, Q33R, E35D, E35G, T41S, M42V, M43L, M43T, D46E, D46N, D46V, M47I, M47L, M47V, M47Y, N48D, N48H, N48K, N48R, N48S, N48T, N48Y, Y53F, K54E, K54R, T57A, T57I, I58V, I61F, I61V, T62A, T62N, I67L, V68E, V68I, V68L, I69F, L70M, A71D, A71G, L72V, R73H, P4S, T79I, T79M, E81G, E81K, V84I, L85M, L85Q, Y87C, Y87D, E88V, D90P, F92V, R94Q, R94W, E95D, E95V, and L97Q.

[0380] In some embodiments, the one or more amino acid substitution is Q27H/T41S/A71D, T13R/C16R/L70Q/A71D, T57I, V22L/M38V/M47T/A71D/L85M, S44P/167T/P74S/E81G/E95D, A71D, T13A/I61N/A71D, E35D/M47I, M47V/N48H, V20I/M47V/T57I/V84I, V20I/M47V/A71D, A71D/L72V/E95K, V22L/E35G/A71D/L72P, E35D/A71D, E35D/I67L/A71D, Q27H/E35G/A71D/L72P/T79I, T13R/M42V/M47/A71D, E35D, E35D/M47I/L70M, E35D/A71D/L72V, E35D/M43L/L70M, A26P/E35D/M43I/L85Q/E88D, E35D/D46V/L85Q, Q27L/E35D/M47/T57I/L70Q/E88D, M47V/I69F/A71D/V83I, E35D/T57A/A71D/L85Q, H18Y/A26T/E35D/A71D/L85Q, E35D/M47L, E23D/M42V/M43I/I58V/L70R, V68M/L70M/A71D/E95K, E35D/M43I/A71D, T41S/T57I/L70R, H18Y/A71D/L72P/E88V, V20I/A71D, E23G/A26S/E35D/T62N/A71D/L72V/L85M, A12T/E24D/E35D/D46V/I61V/L72P/E95V, E35G/K54E/A71D/L72P, L70Q/A71D, A26E/E35D/M47L/L85Q, D46E/A71D, E35D/M47L/L85Q, H18Y/E35D/M47L, A26E/E35D/M43T/M47L/L85Q/R94Q, E24D/Q33L/E35D/M47V/K54R/L85Q, E7D/E35D/M47I/L97Q, H18L/V22A/E35D/M47L/N48T/L85Q, Q27H/E35D/M47L/L85Q/R94Q/E95K, E35D/M47I/E77A/L85Q/R94W, V22A/E35D/V68E/A71D, E35D/M47L/A71G/L97Q, E35D/M47V/A71G/L85M/L97Q, E35D/D46E/M47V/L97Q, E35D/D46V/M47I/A71G/F92V, E35D/L85Q/K93T/E95V/L97Q, Q27H/E35D/M47I/L85Q/D90G, E35D/M47I/L85Q/D90G, E35D/M47I/T62S/L85Q, A26E/E35D/M47L/A71G, V22A/E35D/M47I/Y87N, H18Y/A26E/E35D/M47L/L85Q/D90G, E35D/M47V/A71G/E88D, E35D/A71G, E35D/M47V/A71G, I30V/E35D/M47V/A71G/A91V, V22D/E35D/M47L/L85Q, H18Y/E35D/N48K, E35D/T41S/M47V/A71G/K89N, E35D/M47V/N48T/L85Q, E35D/D46E/M47V/A71D/D90G, E35D/D46E/M47V/A71D, E35D/T41S/M43I/A71G/D90G, E35D/T41S/M43I/M47V/A71G, E35D/T41S/M43I/M47L/A71G, H18Y/Y22A/E35D/M47V/T62S/A71G, H18Y/A26E/E35D/M47L/V68M/A71G/D90G, E35D/K37E/M47V/N48D/L85Q/D90N, E35D/D46V/M47L/V68M/L85Q/E88D, E35D/T41S/M43V/M47I/L70M/A71G, E35D/D46E/M47V/N63D/L85Q, E35D/M47V/T62A/A71D/K93E, E35D/D46E/M47V/V68M/D90G/K93E, E35D/M43I/M47V/K89N, E35D/M47L/A71G/L85M/F92Y, E35D/M42V/M47V/E52D/L85Q, E35D/T41S/M47V/L97Q, E35D/Y53H/A71G/D90G/L97R, E35D/A71D/L72V/R73H/E81K, E35D/M38T/D46E/M47V/N48S, E35D/M38T/M43V/M47V/N48R/L85Q, E35D/N48K/L72V, E35D/T41S/N48T, D46V/M47I/A71G, M47I/A71G, E35D/M43I/M47L/L85M, E35D/M43I/D46E/A71G/L85M, H18Y/E35D/M47L/A71G/A91S, E35D/M47I/N48K/I61F, E35D/M47V/T62S/L85Q, M43I/M47L/A71G, E35D/M47V, E35D/M47L/A71G/L85M, V22A/E35D/M47L/A71G, E35D/M47L/A71G, E35D/D46E/M47I, Q27H/E35D/M47I, E35D/D46E/L85M, E35D/D46E/A91G, E35D/D46E, E35D/L97R, H18Y/E35D, Q27L/E35D/M47V/I61V/L85M, E35D/M47V/I61V/L85M, E35D/M47V/L85M/R94Q, E35D/M47V/N48K/L85M, H18Y/E35D/M47V/N48K, A26E/Q27R/E35D/M47L/N48Y/L85Q, E35D/M47I/T62S/L85Q/E88D, E24D/Q27R/E35D/T41S/M47V/L85Q, S15T/H18Y/E35D/M47V/T62A/N64S/A71G/L85Q/D90N, E35D/M47L/V68M/A71G/L85Q/D90G, H18Y/E35D/M47I/V68M/A71G/R94L, H18Y/Y22A/E35D/T41S/M47V/T62N/A71G/A91G, E24D/E35D/M47L/V68M/E95V/L97Q, E35D/D46E/M47I/T62A/V68M/L85M/Y87C, E35D/D46E/M47I/V68M/L85M, E35D/D46E/M47L/V68M/A71G/Y87C/K93R, E35D/D46E/M47L/V68M/T79M/L85M, E35D/D46E/M47V/V68M/L85Q, E35D/M43I/M47L/V68M, E35D/M47I/V68M/Y87N, E35D/M47L/V68M/E95V/L97Q, E35D/M47L/Y53F/V68M/A71G/K93R/E95V, E35D/M47V/N48K/V68M/A71G/L85M, E35D/M47V/N48K/V68M/L85M, E35D/M47V/V68M/L85M, E35D/M47V/V68M/L85M/Y87D, E35D/T41S/D46E/M47I/V68M/K93R/E95V, H18Y/E35D/D46E/M47I/V68M/R94L, H18Y/E35D/D46E/M47I/V68M/R94L, H18Y/E35D/M47I/V68M/Y87N, H18Y/E35D/M47I/V68M/Y87N, H18Y/E35D/M47L/V68M/A71G/L85M, H18Y/E35D/M47L/V68M/A71G/L85M, H18Y/E35D/M47L/V68M/E95V/L97Q, H18Y/E35D/M47L/V68M/E95V/L97Q, H18Y/E35D/M47L/Y53F/V68M/A71G, H18Y/E35D/M47L/Y53F/V68M/A71G/K93R/E95V, H18Y/E35D/M47V/V68M/L85M, H18Y/E35D/V68M/A71G/R94Q/E95V, H18Y/E35D/V68M/L85M/R94Q, H18Y/E35D/V68M/T79M/L85M, H18Y/V22D/E35D/M47V/N48K/V68M, S21P/E35D/K37E/D46E/M47I/V68M, S21P/E35D/K37E/D46E/M47I/V68M/R94L, T13R/E35D/M47L/V68M, T13R/Q33R/E35D/M38I/M47L/V68M/E95V/L97Q, T13R/Q33R/E35D/M38I/M47L/V68M/L85M, T13R/Q33R/E35D/M38I/M47L/V68M/L85M/R94Q, T13R/Q33R/E35D/M47L/V68M, T13R/Q33R/E35D/M47L/V68M/L85M, V22D/E24D/E35D/M47L/V68M, V22D/E24D/E35D/M47L/V68M/L85M/D90G, V22D/E24D/E35D/M47V/V68M, H18Y/E35D/M47V/V68M/A71G, H18C/A26P/E35D/M47L/V68M/A71G, H18I/A26P/E35D/M47V/V68M/A71G, H18L/A26N/D46E/V68M/A71G/D90G, H18L/E35D/M47V/V68M/A71G/D90G, H18T/A26N/E35D/M47L/V68M/A71G, H18V/A26K/E35D/M47L/V68M/A71G, H18V/A26N/E35D/M47V/V68M/A71G, H18V/A26P/E35D/M47V/V68L/A71G, H18V/A26P/E35D/M47L/V68M/A71G, H18V/E35D/M47V/V68M/A71G/D90G, H18Y/A26P/E35D/M47U/V68M/A71G, H18Y/A26P/E35D/M47V/V68M/A71G, H18Y/E35D/M47V/V68L/A71G/D90G, H18Y/E35D/M47V/V68M/A71G/D90G, A26P/E35D/M47I/V68M/A71G/D90G, H18V/A26G/E35D/M47V/V68M/A71G/D90G, H18V/A26S/E35D/M47L/V68M/A71G/D90G, H18V/A26R/E35D/M47L/V68M/A71G/D90G, H18V/A26D/E35D/M47V/V68M/A71G/D90G, H18V/A26Q/E35D/M47V/V68L/A71G/D90G, H18A/A26P/E35D/M47L/V68M/A71G/D90G, H18A/A26N/E35D/M47L/V68M/A71G/D90G, H18F/A26P/E35D/M47I/V68M/A71G/D90G, H18F/A26H/E35D/M47L/V68M/A71G/D90G, H18F/A26N/E35D/M47V/V68M/A71G/D90K, H18Y/A26N/E35D/M47F/V68M/A71G/D90G, H18Y/A26P/E35D/M47V/V68U/A71G/D90G, H18Y/A26Q/E35D/M47T/V68M/A71G/D90G, H18R/A26P/E35D/D46N/M47V/V68M/A71G/D90P, or H18F/A26D/E35D/D46E/M47T/V68M/A71G/D90G.

[0381] In some embodiments, the variant CD80 polypeptides provided herein, that exhibit increased affinity for the ectodomain of CTLA-4, compared to a wild-type or unmodified CD80 polypeptide, results in decreased inhibitory signal from the CTLA-4 inhibitory receptor. In some embodiments, the variant CD80 polypeptides provided herein blocks interaction of CD80 with CTLA-4, thereby blocking the CTLA-4 inhibitory receptor. In some embodiments, a variant CD80 polypeptide that inhibits or decreases the activity of the inhibitory receptor CTLA-4 will produce a signal that is 90%, 85%, 80%, 75%, 70%, 65%, 60%, 55%, 50%, 45%, 40%, 35%, 30%, 25%, 20%, 15%, 10%, 5%, or less, of the CTLA-4 inhibitory signal in the presence of the wild-type or unmodified CD80 polypeptide. In such examples, the wild-type or unmodified CD80 polypeptide has the same sequence as the variant CD80 polypeptide except that it does not contain the one or more amino acid modifications (e.g., substitutions).

[0382] B. Multimerization Domains

[0383] The variant CD80 IgSF domain fusion proteins comprising a variant CD80 provided herein in which is contained a vIgD can be formatted in a variety of ways as a soluble protein. In some embodiments, the variant CD80 IgSF domain fusion protein contains a multimerization domain. In some embodiments, the multimerization domain is an Fc region. In some particular aspects, the Fc region is an effector Fc capable of binding the FcR and/or mediating one or more effector activity. In other particular aspects, the Fc region is an Fc that is modified by one or more amino acid substitutions to reduce effector activity or to render the Fc inert for Fc effector function.

[0384] In some embodiments, the variant CD80 IgSF domain fusion protein agonizes or stimulates activity of its binding partner, e.g., CD28. In some embodiments, agonism of CD28 may be useful to promote immunity in oncology. In some cases, a variant CD80 IgSF domain fusion protein comprising a variant CD80 polypeptide is provided to antagonize or block activity of its binding partner, e.g., CTLA-4 and/or PD-L1. In some embodiments, antagonism of CTLA-4 or PD-L1/PD-1 may be useful to promote immunity in oncology. In some embodiments, agonism of CD28 can be dependent on or enhanced by CD80 binding of PD-L1. Such PD-L1-dependent agonism of CD28 may be useful to promote immunity in oncology. A skilled artisan can readily determine the activity of a particular format, such as for antagonizing or agonizing one or more specific binding partner. Exemplary methods for assessing such activities are provided herein, including in the examples.

[0385] In some embodiments, the immunomodulatory protein containing a variant CD80 polypeptide is a soluble protein. Those of skill will appreciate that cell surface proteins typically have an intracellular, transmembrane, and extracellular domain (ECD) and that a soluble form of such proteins can be made using the extracellular domain or an immunologically active subsequence thereof. Thus, in some embodiments, the immunomodulatory protein containing a variant CD80 polypeptide lacks a transmembrane domain or a portion of the transmembrane domain. In some embodiments, the immunomodulatory protein containing a variant CD80 lacks the intracellular (cytoplasmic) domain or a portion of the intracellular domain. In some embodiments, the immunomodulatory protein containing the variant CD80 polypeptide only contains the vIgD portion containing the ECD domain or a portion thereof containing an IgV domain and/or IgC (e.g., IgC2) domain or domains or specific binding fragments thereof containing the amino acid modification(s).

[0386] In some aspects, provided are variant CD80 IgSF domain fusion proteins comprising a vIgD of CD80 that is fused to a multimerization domain, e.g. an Fc chain. Those of skill will appreciate that cell surface proteins typically have an intracellular, transmembrane, and extracellular domain (ECD) and that a soluble form of such proteins can be made using the extracellular domain or an immunologically active subsequence thereof. Thus, in some embodiments, the immunomodulatory protein containing a variant CD80 polypeptide lacks a transmembrane domain or a portion of the transmembrane domain. In some embodiments, the immunomodulatory protein containing a variant CD80 lacks the intracellular (cytoplasmic) domain or a portion of the intracellular domain. In some embodiments, the immunomodulatory protein containing the variant CD80 polypeptide only contains the vIgD portion containing the ECD domain or a portion thereof containing an IgV domain and/or IgC (e.g., IgC2) domain or domains or specific binding fragments thereof containing the amino acid modification(s).

[0387] In some embodiments, a variant CD80 IgSF domain fusion protein comprising a variant CD80 can include one or more variant CD80 polypeptides of the invention. In some embodiments a polypeptide of the invention will comprise exactly 1, 2, 3, 4, 5 variant CD80 sequences. In some embodiments, at least two of the variant CD80 sequences are identical variant CD80 sequences.

[0388] In some embodiments, the provided variant CD80 IgSF domain fusion protein comprises two or more vIgD sequences of CD80. In some embodiments, the provided variant CD80 IgSF domain fusion protein comprises three or more vIgD sequences of CD80. In some embodiments, the variant CD80 IgSF domain fusion protein exhibits multivalent binding to its binding partner. For example, in some cases, the variant CD80 IgSF domain fusion protein exhibits bivalent, trivalent, tetravalent, pentavalent, or hexavalent binding to its binding partner. In some embodiments, the provided variant CD80 IgSF domain fusion protein is bivalent. In some embodiments, the provided variant CD80 IgSF domain fusion protein is tetravalent.

[0389] In some embodiments, multiple variant CD80 polypeptides within the polypeptide chain can be identical (i.e., the same species) to each other or be non-identical (i.e., different species) variant CD80 sequences. In addition to single polypeptide chain embodiments, in some embodiments two, three, four, or more of the polypeptides of the invention can be covalently or non-covalently attached to each other. Thus, monomeric, dimeric, and higher order (e.g., 3, 4, 5, or more) multimeric proteins are provided herein. For example, in some embodiments exactly two polypeptides of the invention can be covalently or non-covalently attached to each other to form a dimer. In some embodiments, attachment is made via interchain cysteine disulfide bonds. Compositions comprising two or more polypeptides of the invention can be of an identical species or substantially identical species of polypeptide (e.g., a homodimer) or of non-identical species of polypeptides (e.g., a heterodimer). A composition having a plurality of linked polypeptides of the invention can, as noted above, have one or more identical or non-identical variant CD80 polypeptides of the invention in each polypeptide chain.

[0390] In some embodiments, the immunomodulatory protein contains a variant CD80 polypeptide that is linked, directly or indirectly via a linker to a multimerization domain. For example, the variant CD80 IgSF domain fusion proteins provided herein can be formatted as multimeric (e.g. dimeric, trimeric, tetrameric, or pentameric) molecules. In some aspects, the multimerization domain increases the half-life of the molecule. Interaction of two or more variant CD80 polypeptides can be facilitated by their linkage, either directly or indirectly, to any moiety or other polypeptide that are themselves able to interact to form a stable structure. For example, separate encoded variant CD80 polypeptide chains can be joined by multimerization, whereby multimerization of the polypeptides is mediated by a multimerization domain. Typically, the multimerization domain provides for the formation of a stable protein-protein interaction between a first variant CD80 polypeptide and a second variant CD80 polypeptide.

[0391] Homo- or heteromultimeric polypeptides can be generated from co-expression of separate variant CD80 polypeptides. The first and second variant CD80 polypeptides can be the same or different. In particular embodiments, the first and second variant CD80 polypeptides are the same in a homodimer, and each is linked to a multimerization domain that is the same. In other embodiments, heterodimers can be formed by linking first and second variant CD80 polypeptides that are different. In some of such embodiments, the first and second variant CD80 polypeptide are linked to different multimerization domains capable of promoting heterodimer formation.

[0392] In some embodiments, a multimerization domain includes any capable of forming a stable protein-protein interaction. The multimerization domains can interact via an immunoglobulin sequence (e.g. Fc domain; see e.g., International Patent Pub. Nos. WO 93/10151 and WO 2005/063816 US; U.S. Pub. No. 2006/0024298; U.S. Pat. No. 5,457,035); leucine zipper (e.g., from nuclear transforming proteins fos and jun or the proto-oncogene c-myc or from General Control of Nitrogen (GCN4)) (see e.g., Busch and Sassone-Corsi (1990) Trends Genetics, 6:36-40; Gentz et al., (1989) Science, 243:1695-1699); a hydrophobic region; a hydrophilic region; or a free thiol which forms an intermolecular disulfide bond between the chimeric molecules of a homo- or heteromultimer. In addition, a multimerization domain can include an amino acid sequence comprising a protuberance complementary to an amino acid sequence comprising a hole, such as is described, for example, in U.S. Pat. No. 5,731,168; International Patent Pub. Nos. WO 98/50431 and WO 2005/063816; Ridgway et al. (1996) Protein Engineering, 9:617-621. Such a multimerization region can be engineered such that steric interactions not only promote stable interaction, but further promote the formation of heterodimers over homodimers from a mixture of chimeric monomers. Generally, protuberances are constructed by replacing small amino acid side chains from the interface of the first polypeptide with larger side chains (e.g., tyrosine or tryptophan). Compensatory cavities of identical or similar size to the protuberances are optionally created on the interface of the second polypeptide by replacing large amino acid side chains with smaller ones (e.g., alanine or threonine). Exemplary multimerization domains are described below.

[0393] The variant CD80 polypeptide can be joined anywhere, but typically via its N- or C-terminus, to the N- or C-terminus of a multimerization domain to form a chimeric polypeptide. The linkage can be direct or indirect via a linker. The chimeric polypeptide can be a fusion protein or can be formed by chemical linkage, such as through covalent or non-covalent interactions. For example, when preparing a chimeric polypeptide containing a multimerization domain, nucleic acid encoding all or part of a variant CD80 polypeptide can be operably linked to nucleic acid encoding the multimerization domain sequence, directly or indirectly or optionally via a linker domain. In some cases, the construct encodes a chimeric protein where the C-terminus of the variant CD80 polypeptide is joined to the N-terminus of the multimerization domain. In some instances, a construct can encode a chimeric protein where the N-terminus of the variant CD80 polypeptide is joined to the C-terminus of the multimerization domain.

[0394] In some embodiments, the variant CD80 IgSF domain fusion protein comprises two or more polypeptides joined by multimerization, such as joined as dimeric, trimeric, tetrameric, or pentameric molecules. In some embodiments of the configurations, the variant CD80 IgSF domain fusion proteins containing one or more variant CD80 polypeptides are fused to a multimerization domain. In some examples, the variant CD80 IgSF domain fusion proteins containing one or more variant CD80 polypeptides (e.g., comprising separate encoded polypeptide chains) are fused with a sequence of amino acids that promotes dimerization, trimerization, tetramerization, or pentamerization of the proteins.

[0395] In some embodiments, the variant CD80 IgSF domain fusion proteins containing one or more variant CD80 polypeptides (e.g., separate encoded polypeptide chains) are fused with a sequence of amino acids that promotes pentamerization of the proteins. In some embodiments, the variant CD80 IgSF domain fusion proteins containing one or more variant CD80 polypeptides (e.g., separate encoded polypeptide chains) are fused to a portion of the cartilage oligomeric matrix protein (COMP) assembly domain (Voulgaraki et al., Immunology (2005) 115(3):337-346. In some examples, the COMP is or contains an amino acid sequence as set forth in SEQ ID NO: 1524 (e.g. amino acids 29-72 of the full length COMP, Uniprot accession number P49747) or a sequence that has 85%, 85%, 87%, 88%, 89%, 90%, 91%, 92%, 93%, 94%, 95%, 96%, 97%, 98%, 99% or more sequence identity to SEQ ID NO: 1524.

[0396] In some embodiments, the variant CD80 IgSF domain fusion proteins containing one or more variant CD80 polypeptides (e.g., separate encoded polypeptide chains) are fused with a sequence of amino acids that promotes tetramerization of the proteins. In some embodiments, the variant CD80 IgSF domain fusion proteins containing one or more variant CD80 polypeptides (e.g., separate encoded polypeptide chains) are fused to a vasodilator-stimulated phosphoprotein (VASP) tetramerization domain (Bachmann et al., J Biol Chem (1999) 274(33):23549-23557). In some embodiments, the VASP is or contains an amino acid sequence as set forth in SEQ ID NO: 1525 (e.g. amino acids 343-375 of the full length VASP; Uniprot accession number P50552) or a sequence that has 85%, 85%, 87%, 88%, 89%, 90%, 91%, 92%, 93%, 94%, 95%, 96%, 97%, 98%, 99% or more sequence identity to SEQ ID NO: 1525.

[0397] In some embodiments, the variant CD80 IgSF domain fusion proteins containing one or more variant CD80 polypeptides (e.g., separate encoded polypeptide chains) are fused with a sequence of amino acids that promotes trimerization of the proteins. In some embodiments, the variant CD80 IgSF domain fusion proteins containing one or more variant CD80 polypeptides (e.g., separate encoded polypeptide chains) are fused to a ZymoZipper (ZZ) 12.6 domain. In some embodiments, the ZZ domain is or contains an amino acid sequence as set forth in SEQ ID NO: 1526 (See U.S. Pat. No. 7,655,439) or a sequence that has 85%, 85%, 87%, 88%, 89%, 90%, 91%, 92%, 93%, 94%, 95%, 96%, 97%, 98%, 99% or more sequence identity to SEQ ID NO: 1526.

[0398] In some embodiments, the variant CD80 IgSF domain fusion protein is tetravalent. In some embodiments, the variant CD80 IgSF domain fusion protein contains two copies of a variant CD80 IgSf domain. In some embodiments, the variant CD80 IgSF domain fusion protein comprises the components variant CD80 IgSf domain(s), linker(s), and multimerization domain in various order and combinations. In some embodiments, the variant CD80 IgSF domain fusion protein comprises the following in the order: variant CD80 IgSF domain—linker—multimerization domain—linker—variant CD80 IgSf domain. In some embodiments, the variant CD80 IgSF domain fusion protein comprises the following in the order: variant CD80 IgSF domain—linker—variant CD80 IgSf domain—linker—multimerization domain. In some embodiments, the variant CD80 IgSF domain fusion protein comprises the following in the order: multimerization domain—linker—variant CD80 IgSF domain—variant CD80 IgSf domain. Exemplary variant CD80 IgSF domain fusion proteins are shown in FIG. 3. In some embodiments, the variant CD80 IgSF domain fusion protein can further contain a third CD80 vIgD. In some embodiments, the CD80 vIgD(s) are independently linked, directly or indirectly, to the N- or C-terminus of an Fc region or to the N- or C-terminus of another CD80 vIgD.

[0399] A polypeptide multimer contains multiple, such as two, chimeric proteins created by linking, directly or indirectly, two of the same or different variant CD80 polypeptides directly or indirectly to a multimerization domain. In some examples, where the multimerization domain is a polypeptide, a gene fusion encoding the variant CD80 polypeptide and multimerization domain is inserted into an appropriate expression vector. The resulting chimeric or fusion protein can be expressed in host cells transformed with the recombinant expression vector, and allowed to assemble into multimers, where the multimerization domains interact to form multivalent polypeptides. Chemical linkage of multimerization domains to variant CD80 polypeptides can be carried out using heterobifunctional linkers.

[0400] The resulting chimeric polypeptides, such as fusion proteins, and multimers formed therefrom, can be purified by any suitable method such as, for example, by affinity chromatography over Protein A or Protein G columns. Where two nucleic acid molecules encoding different polypeptides are transformed into cells, formation of homo- and heterodimers will occur. Conditions for expression can be adjusted so that heterodimer formation is favored over homodimer formation.

[0401] In some embodiments, the multimerization domain is an Fc domain or portions thereof from an immunoglobulin. In some embodiments, the variant CD80 IgSF domain fusion protein comprises one or more variant CD80 polypeptide(s) attached to an immunoglobulin Fc (yielding an “immunomodulatory Fc fusion,” such as a “variant CD80-Fc fusion,” also termed a CD80 vIgD-Fc fusion). In some embodiments, the attachment of the variant CD80 polypeptide(s) is at the N-terminus of the Fc. In some embodiments, the attachment of the variant CD80 polypeptide (s) is at the C-terminus of the Fc. In some embodiments, two or more CD80 variant polypeptides (the same or different) are independently attached at the N-terminus and at the C-terminus.

[0402] In some embodiments, the one or more variant CD80 polypeptide(s) can be joined anywhere, but typically via its N- or C-terminus, to the N- or C-terminus of a multimerization domain to form a chimeric polypeptide. The linkage can be direct or indirect via a linker. Also, the chimeric polypeptide can be a fusion protein or can be formed by chemical linkage, such as through covalent or non-covalent interactions. For example, when preparing a chimeric polypeptide containing a multimerization domain, nucleic acid encoding one or more variant CD80 polypeptide(s) can be operably linked to nucleic acid encoding the multimerization domain sequence, directly or indirectly or optionally via a linker domain. In some cases, the construct encodes a chimeric protein where the C-terminus of the variant CD80 polypeptide is joined to the N-terminus of the multimerization domain. In some instances, a construct can encode a chimeric protein where the N-terminus of the variant CD80 polypeptide is joined to the N- or C-terminus of the multimerization domain.

[0403] In some embodiments, the one or more variant CD80 polypeptides are positioned N-terminal to the multimerization domain. In some embodiments, two variant CD80 polypeptide(s) are positioned N-terminal to the multimerization domain. In some embodiments, the one or more variant CD80 polypeptide(s) are positioned C-terminal to the multimerization domain. In some embodiments, two variant CD80 polypeptides are positioned C-terminal to the multimerization domain.

[0404] In some embodiments, each of the multimerization domain is linked to two or more variant CD80 polypeptides to form a chimeric polypeptide. In some cases, the construct encodes a chimeric protein where the C-terminus of the first variant CD80 polypeptide is joined to the N-terminus of a second variant CD80 polypeptide and the C-terminus of the second variant CD80 polypeptide is joined to N-terminus of the multimerization domain. In some embodiments, the construct encodes a chimeric protein where the C-terminus of the multimerization domain is joined to the N-terminus of the first variant CD80 polypeptide and the C-terminus of the first variant CD80 polypeptide is joined to the N-terminus of the second variant CD80 polypeptide. In some embodiments, the construct encodes a chimeric protein where the C-terminus of the first variant CD80 polypeptide is joined the the N-terminus of the multimerization domain and C-terminus of the multimerization domain is joined to the the N-terminus of the second variant CD80 polypeptide. In some embodiments, the multimerization domain is an Fc domain or portions thereof from an immunoglobulin.

[0405] In some embodiments, the first and the second variant CD80 polypeptide are the same. In some embodiments, the first and the second variant CD80 polypeptides are different. In some embodiments, the chimeric polypeptide further contains a third CD80 polypeptide joined either N-terminal or C-terminal to the polypeptides described.

[0406] In some embodiments, the variant CD80 IgSF domain fusion protein comprises two or more polypeptides joined by multimerization, such as joined as dimeric, trimeric, tetrameric, or pentameric molecules, each polypeptide having the configuration of the chimeric polypeptides containing one or more variant CD80 polypeptides as described.

[0407] In some embodiments, the Fc is murine or human Fc. In some embodiments, the Fc is a mammalian or human IgG1, lgG2, lgG3, or lgG4 Fc regions. In some embodiments, the Fc is derived from IgG1, such as human IgG1. In some embodiments, the Fc comprises the amino acid sequence set forth in SEQ ID NO: 1502, 1510, or 1518 or a sequence of amino acids that exhibits at least 85%, 86%, 87%, 88%, 89%, 90%, 91%, 92%, 93%, 94%, 95%, 96%, 97%, 98%, 99% or more sequence identity to SEQ ID NO: 1502, 1510, or 1518.

[0408] In some embodiments, the Fc region contains one more modifications to alter (e.g., reduce) one or more of its normal functions. In general, the Fc region is responsible for effector functions, such as complement-dependent cytotoxicity (CDC) and antibody-dependent cell cytotoxicity (ADCC), in addition to the antigen-binding capacity, which is the main function of immunoglobulins. Additionally, the FcRn sequence present in the Fc region plays the role of regulating the IgG level in serum by increasing the in vivo half-life by conjugation to an in vivo FcRn receptor. In some embodiments, such functions can be reduced or altered in an Fc for use with the provided Fc fusion proteins.

[0409] In some embodiments, one or more amino acid modifications may be introduced into the Fc region of a CD80-Fc variant fusion provided herein, thereby generating an Fc region variant. In some embodiments, the Fc region variant has decreased effector function. There are many examples of changes or mutations to Fc sequences that can alter effector function. For example, WO 00/42072, WO2006019447, WO2012125850, WO2015/107026, US2016/0017041 and Shields et al. J Biol. Chem. 9(2): 6591-6604 (2001) describe exemplary Fc variants with improved or diminished binding to FcRs. The contents of those publications are specifically incorporated herein by reference.

[0410] In some embodiments, the provided variant CD80-Fc fusions comprise an Fc region that exhibits reduced effector functions, which makes it a desirable candidate for applications in which the half-life of the CD80-Fc variant fusion in vivo is important yet certain effector functions (such as CDC and ADCC) are unnecessary or deleterious. In vitro and/or in vivo cytotoxicity assays can be conducted to confirm the reduction/depletion of CDC and/or ADCC activities. For example, Fc receptor (FcR) binding assays can be conducted to ensure that the CD80-Fc variant fusion lacks FcγR binding (hence likely lacking ADCC activity), but retains FcRn binding ability. The primary cells for mediating ADCC, NK cells, express FcγRIII only, whereas monocytes express FcγRI, FcγRII and FcγRIII. FcR expression on hematopoietic cells is summarized in Table 3 on page 464 of Ravetch and Kinet, Annu. Rev. Immunol. 9:457-492 (1991). Non-limiting examples of in vitro assays to assess ADCC activity of a molecule of interest is described in U.S. Pat. No. 5,500,362 (see, e.g., Hellstrom, I. et al. Proc. Nat'l Acad. Sci. USA 83:7059-7063 (1986)) and Hellstrom, I et al., Proc. Nat'l Acad. Sci. USA 82:1499-1502 (1985); U.S. Pat. No. 5,821,337 (see Bruggemann, M. et al., J. Exp. Med. 166:1351-1361 (1987)). Alternatively, non-radioactive assay methods may be employed (see, for example, ACTFI™ non-radioactive cytotoxicity assay for flow cytometry (CellTechnology, Inc. Mountain View, Calif.; and CytoTox 96™ non-radioactive cytotoxicity assay (Promega, Madison, Wis.). Useful effector cells for such assays include peripheral blood mononuclear cells (PBMC) and Natural Killer (NK) cells. Alternatively, or additionally, ADCC activity of the molecule of interest may be assessed in vivo, e.g., in an animal model such as that disclosed in Clynes et al. Proc. Nat'l Acad. Sci. USA 95:652-656 (1998). C1q binding assays may also be carried out to confirm that the CD80-Fc variant fusion is unable to bind C1q and hence lacks CDC activity. See, e.g., C1q and C3c binding ELISA in WO 2006/029879 and WO 2005/100402. To assess complement activation, a CDC assay may be performed (see, for example, Gazzano-Santoro et al., J. Immunol. Methods 202:163 (1996); Cragg, M. S. et al., Blood 101:1045-1052 (2003); and Cragg, M. S. and M. J. Glennie, Blood 103:2738-2743 (2004)). FcRn binding and in vivo clearance/half-life determinations can also be performed using methods known in the art (see, e.g., Petkova, S. B. et al., Int'l. Immunol. 18(12):1759-1769 (2006)).

[0411] Variant CD80 IgSF domain fusion proteins with reduced effector function include those with substitution of one or more of Fc region residues 238, 265, 269, 270, 297, 327 and 329 by EU numbering (U.S. Pat. No. 6,737,056). Such Fc mutants include Fc mutants with substitutions at two or more of amino acid positions 265, 269, 270, 297 and 327 by EU numbering, including the so-called “DANA” Fc mutant with substitution of residues 265 and 297 to alanine (U.S. Pat. No. 7,332,581).

[0412] In some embodiments, the Fc region of variant CD80 IgSF domain fusion proteins has an Fc region in which any one or more of amino acids at positions 234, 235, 236, 237, 238, 239, 270, 297, 298, 325, and 329 (indicated by EU numbering) are substituted with different amino acids compared to the native Fc region. Such alterations of Fc region are not limited to the above-described alterations, and include, for example, alterations such as deglycosylated chains (N297A and N297Q), IgG1-N297G, IgG1-L234A/L235A, IgG1-L234A/L235E/G237A, IgG1-A325A/A330S/P331S, IgG1-C226S/C229S, IgG1-C226S/C229S/E233P/L234V/L235A, IgG1-E233P/L234V/L235A/G236del/S267K, IgG1-L234F/L235E/P331S, IgG1-S267E/L328F, IgG2-V234A/G237A, IgG2-H268Q/V309L/A330S/A331S, IgG4-L235A/G237A/E318A, and IgG4-L236E described in Current Opinion in Biotechnology (2009) 20 (6), 685-691; alterations such as G236R/L328R, L235G/G236R, N325A/L328R, and N325LL328R described in WO 2008/092117; amino acid insertions at positions 233, 234, 235, and 237 (indicated by EU numbering); and alterations at the sites described in WO 2000/042072.

[0413] Certain Fc variants with improved or diminished binding to FcRs are described. (See, e.g., U.S. Pat. No. 6,737,056; WO 2004/056312, WO2006019447 and Shields et al., J. Biol. Chem. 9(2): 6591-6604 (2001).)

[0414] In some embodiments, there is provided a variant CD80 IgSF domain fusion protein comprising a variant Fc region comprising one or more amino acid substitutions which increase half-life and/or improve binding to the neonatal Fc receptor (FcRn). Antibodies with increased half-lives and improved binding to FcRn are described in US2005/0014934A1 (Hinton et al.) or WO2015107026. Those antibodies comprise an Fc region with one or more substitutions therein which improve binding of the Fc region to FcRn. Such Fc variants include those with substitutions at one or more of Fc region residues: 238, 256, 265, 272, 286, 303, 305, 307, 311, 312, 317, 340, 356, 360, 362, 376, 378, 380, 382, 413, 424 or 434 by EU numbering, e.g., substitution of Fc region residue 434 (U.S. Pat. No. 7,371,826).

[0415] In some embodiments, the Fc region of a CD80-Fc variant fusion comprises one or more amino acid substitution E356D and M358L by EU numbering. In some embodiments, the Fc region of a CD80-Fc variant fusion comprises one or more amino acid substitutions C220S, C226S and/or C229S by EU numbering. In some embodiments, the Fc region of a CD80 variant fusion comprises one or more amino acid substitutions R292C and V302C. See also Duncan & Winter, Nature 322:738-40 (1988); U.S. Pat. Nos. 5,648,260; 5,624,821; and WO 94/29351 concerning other examples of Fc region variants.

[0416] In some embodiments, the wild-type IgG1 Fc can be the Fc set forth in SEQ ID NO: 1502 having an allotype containing residues Glu (E) and Met (M) at positions 356 and 358 by EU numbering (e.g., f allotype). In other embodiments, the wild-type IgG1 Fc contains amino acids of the human G1m1 allotype, such as residues containing Asp (D) and Leu (L) at positions 356 and 358, e.g. as set forth in SEQ ID NO:1527. Thus, in some cases, an Fc provided herein can contain amino acid substitutions E356D and M358L to reconstitute residues of allotype G1 ml (e.g., alpha allotype). In some aspects, a wild-type Fc is modified by one or more amino acid substitutions to reduce effector activity or to render the Fc inert for Fc effector function. Exemplary effectorless or inert mutations include those described herein. Among effectorless mutations that can be included in an Fc of constructs provided herein are L234A, L235E and G237A by EU numbering. In some embodiments, a wild-type Fc is further modified by the removal of one or more cysteine residue, such as by replacement of the cysteine residues to a serine residue at position 220 (C220S) by EU numbering. Exemplary inert Fc regions having reduced effector function are set forth in SEQ ID NO: 1508 and SEQ ID NO: 1518, which are based on allotypes set forth in SEQ ID NO: 1502 or SEQ ID NO: 1527, respectively. In some embodiments, an Fc region used in a construct provided herein can further lack a C-terminal lysine residue.

[0417] In some embodiments, alterations are made in the Fc region that result in diminished C1q binding and/or Complement Dependent Cytotoxicity (CDC), e.g., as described in U.S. Pat. No. 6,194,551, WO 99/51642, and Idusogie et al., J. Immunol. 164: 4178-4184 (2000).

[0418] In some embodiments, there is provided a CD80-Fc variant fusion comprising a variant Fc region comprising one or more amino acid modifications, wherein the variant Fc region is derived from IgG1, such as human IgG1. In some embodiments, the variant Fc region is derived from the amino acid sequence set forth in SEQ ID NO: 1502. In some embodiments, the Fc contains at least one amino acid substitution that is N82G by numbering of SEQ ID NO: 1502 (corresponding to N297G by EU numbering). In some embodiments, the Fc further contains at least one amino acid substitution that is R77C or V87C by numbering of SEQ ID NO: 1502 (corresponding to R292C or V302C by EU numbering). In some embodiments, the variant Fc region further comprises a C5S amino acid modification by numbering of SEQ ID NO: 1502 (corresponding to C220S by EU numbering), such as the Fc region set forth in SEQ ID NO: 1517. For example, in some embodiments, the variant Fc region comprises the following amino acid modifications: V297G and one or more of the following amino acid modifications C220S, R292C or V302C by EU numbering (corresponding to N82G and one or more of the following amino acid modifications C5S, R77C or V87C with reference to SEQ ID NO: 1502), e.g., the Fc region comprises the sequence set forth in SEQ ID NO: 1507. In some embodiments, the variant Fc region comprises one or more of the amino acid modifications C220S, L234A, L235E or G237A, e.g., the Fc region comprises the sequence set forth in SEQ ID NO: 1508. In some embodiments, the variant Fc region comprises one or more of the amino acid modifications C220S, L235P, L234V, L235A, G236del or S267K, e.g., the Fc region comprises the sequence set forth in SEQ ID NO: 1509. In some embodiments, the variant Fc comprises one or more of the amino acid modifications C220S, L234A, L235E, G237A, E356D or M358L, e.g., the Fc region comprises the sequence set forth in SEQ ID NO: 1513.

[0419] In some embodiments, CD80-Fc variant fusion provided herein contains a variant CD80 polypeptide in accord with the description set forth in Section I.A above. In some embodiments, there is provided a CD80-Fc variant fusion comprising any one of the described variant CD80 polypeptide linked to a variant Fc region, wherein the variant Fc region is not a human IgG1 Fc containing the mutations R292C, N297G and V302C (corresponding to R77C, N82G and V87C with reference to wild-type human IgG1 Fc set forth in SEQ ID NO: 1502). In some embodiments, there is provided a CD80-Fc variant fusion comprising any one of the variant CD80 polypeptide linked to an Fc region or variant Fc region, wherein the variant CD80 polypeptide is not linked to the Fc with a linker consisting of three alanines.

[0420] In some embodiments, the Fc region lacks the C-terminal lysine corresponding to position 232 of the wild-type or unmodified Fc set forth in SEQ ID NO: 1502 (corresponding to K447del by EU numbering). In some aspects, such an Fc region can additionally include one or more additional modifications, e.g., amino acid substitutions, such as any as described. Examples of such an Fc region are set forth in SEQ ID NO: 1508-1510, 1513, or 1519-1521.

[0421] In some embodiments, there is provided a CD80-Fc variant fusion comprising a variant Fc region in which the variant Fc comprises the sequence of amino acids set forth in any of SEQ ID NOS: 1513, 1508-1510, 1517, or 1519-1521 or a sequence of amino acids that exhibits at least 85%, 86%, 87%, 88%, 89%, 90%, 91%, 92%, 93%, 94%, 95%, 96%, 97%, 98%, 99% or more sequence identity to any of SEQ ID NOS: 1513, 1508-1510, 1517, or 1519-1521.

[0422] In some embodiments, the Fc is derived from IgG2, such as human IgG2. In some embodiments, the Fc comprises the amino acid sequence set forth in SEQ ID NO: 1503 or a sequence of amino acids that exhibits at least 85%, 86%, 87%, 88%, 89%, 90%, 91%, 92%, 93%, 94%, 95%, 96%, 97%, 98%, 99% or more sequence identity to SEQ ID NO: 1503.

[0423] In some embodiments, the Fc comprises the amino acid sequence set forth in SEQ ID NO: 1515 or a sequence of amino acids that exhibits at least 85%, 86%, 87%, 88%, 89%, 90%, 91%, 92%, 93%, 94%, 95%, 96%, 97%, 98%, 99% or more sequence identity to SEQ ID NO: 1515. In some embodiments, the IgG4 Fc is a stabilized Fc in which the CH3 domain of human IgG4 is substituted with the CH3 domain of human IgG1 and which exhibits inhibited aggregate formation, an antibody in which the CH3 and CH2 domains of human IgG4 are substituted with the CH3 and CH2 domains of human IgG1, respectively, or an antibody in which arginine at position 409 indicated in the EU index proposed by Kabat et al. of human IgG4 is substituted with lysine and which exhibits inhibited aggregate formation (see e.g., U.S. Pat. No. 8,911,726. In some embodiments, the Fc is an IgG4 containing the S228P mutation, which has been shown to prevent recombination between a therapeutic antibody and an endogenous IgG4 by Fab-arm exchange (see e.g., Labrijin et al. (2009) Nat. Biotechnol., 27(8): 767-71). In some embodiments, the Fc comprises the amino acid sequence set forth in SEQ ID NO: 1516 or a sequence of amino acids that exhibits at least 85%, 86%, 87%, 88%, 89%, 90%, 91%, 92%, 93%, 94%, 95%, 96%, 97%, 98%, 99% or more sequence identity to SEQ ID NO: 1516.

[0424] In some embodiments, the variant CD80 IgSF domain fusion protein is indirectly linked to the Fc sequence, such as via a linker. In some embodiments, one or more “peptide linkers” link the variant CD80 polypeptide and the Fc domain. In some embodiments, a peptide linker can be a single amino acid residue or greater in length. In some embodiments, the peptide linker has at least one amino acid residue but is no more than 20, 19, 18, 17, 16, 15, 14, 13, 12, 11, 10, 9, 8, 7, 6, 5, 4, 3, 2, or 1 amino acid residues in length. In some embodiments, the linker is a flexible linker. In some embodiments, the linker is (in one-letter amino acid code): GGGGS (“4GS” or “G₄S”; SEQ ID NO: 1523) or multimers of the 4GS linker, such as repeats of 2, 3, 4, or 5 4GS linkers, such as set forth in SEQ ID NO: 1505 (2×GGGS; (G₄S)₂) or SEQ ID NO: 1504 (3×GGGS; (G₄S)₃). In some embodiments, the linker can include a series of alanine residues alone or in addition to another peptide linker (such as a 4GS linker or multimer thereof). In some embodiments, the number of alanine residues in each series is 2, 3, 4, 5, or 6 alanines. In some embodiments, the linker is three alanines (AAA). In some embodiments, the variant CD80 polypeptide is indirectly linked to the Fc sequence via a linker, wherein the linker doe not consist of three alanines. In some examples, the linker is a 2×GGGS followed by three alanines (GGGGSGGGGSAAA; SEQ ID NO: 1506). In some embodiments, the linker can further include amino acids introduced by cloning and/or from a restriction site, for example the linker can include the amino acids GS (in one-letter amino acid code) as introduced by use of the restriction site BAMHI. For example, in some embodiments, the linker (in one-letter amino acid code) is GSGGGGS (SEQ ID NO:1522), GS(G₄S)₃ (SEQ ID NO: 1243), or GS(G₄S)₅ (SEQ ID NO: 1244). In some embodiments, the linker is a rigid linker. For example, the linker is an α-helical linker. In some embodiments, the linker is (in one-letter amino acid code): EAAAK or multimers of the EAAAK linker, such as repeats of 2, 3, 4, or 5 EAAAK linkers, such as set forth in SEQ ID NO: 1241 (1×EAAAK), SEQ ID NO: 1242 (3×EAAAK), or SEQ ID NO: 1251 (5×EAAAK). In some cases, the immunomodulatory polypeptide comprising a variant CD80 comprises various combinations of peptide linkers.

[0425] In some embodiments, the variant CD80 polypeptide of the variant CD80 IgSF domain fusion protein is directly linked to the Fc sequence. In some embodiments, the variant CD80 polypeptide is directly linked to an Fc, such as an inert Fc, that was additionally lacking all or a portion of the hinge region. An exemplary Fc, lacking a portion (6 amino acids) of the hinge region is set forth in SEQ ID NO: 1240. In some embodiments, where the CD80 polypeptide is directly linked to the Fc sequence, the CD80 polypeptide can be truncated at the C-terminus by 1, 2, 3, 4, 5, 6, 7, 8, 9, 10, 12, 13, 14, 15, or more amino acids. In some embodiments, the variant CD80 polypeptide is truncated to remove 1, 2, 3, 4, 5, 6, 7, 8, 9, 10, or more amino acids that connect the IgV region to the IgC region. For example, variant CD80 polypeptides can contain modifications in the exemplary wild-type CD80 backbone set forth in SEQ ID NO: 1245).

[0426] In some embodiments, the variant CD80 IgSF domain fusion protein (e.g. variant CD80-Fc fusion protein) is a dimer formed by two variant CD80 Fc polypeptides linked to an Fc domain. In some specific embodiments, identical or substantially identical species (allowing for 3 or fewer N-terminus or C-terminus amino acid sequence differences) of CD80-Fc variant fusion polypeptides will be dimerized to create a homodimer. In some embodiments, the dimer is a homodimer in which the two variant CD80 Fc polypeptides are the same. Alternatively, different species of CD80-Fc variant fusion polypeptides can be dimerized to yield a heterodimer. Thus, in some embodiments, the dimer is a heterodimer in which the two variant CD80 Fc polypeptides are different.

[0427] Also provided are nucleic acid molecules encoding the variant CD80-Fc fusion protein. In some embodiments, for production of an Fc fusion protein, a nucleic acid molecule encoding a variant CD80-Fc fusion protein is inserted into an appropriate expression vector. The resulting variant CD80-Fc fusion protein can be expressed in host cells transformed with the expression where assembly between Fc domains occurs by interchain disulfide bonds formed between the Fc moieties to yield dimeric, such as divalent, variant CD80-Fc fusion proteins.

[0428] The resulting Fc fusion proteins can be easily purified by affinity chromatography over Protein A or Protein G columns. For the generation of heterodimers, additional steps for purification can be necessary. For example, where two nucleic acids encoding different variant CD80 polypeptides are transformed into cells, the formation of heterodimers must be biochemically achieved since variant CD80 molecules carrying the Fc-domain will be expressed as disulfide-linked homodimers as well. Thus, homodimers can be reduced under conditions that favor the disruption of interchain disulfides, but do no effect intra-chain disulfides. In some cases, different variant-CD80 Fc monomers are mixed in equimolar amounts and oxidized to form a mixture of homo- and heterodimers. The components of this mixture are separated by chromatographic techniques. Alternatively, the formation of this type of heterodimer can be biased by genetically engineering and expressing Fc fusion molecules that contain a variant CD80 polypeptide using knob-into-hole methods described below.

[0429] C. Secreted Immunomodulatory Proteins (SIP) and Engineered Cells

[0430] Provided herein are engineered cells which express any of the immunomodulatory variant CD80 polypeptides (alternatively, “engineered cells). In some embodiments, the expressed immunomodulatory variant CD80 polypeptide is expressed and secreted from the cell (herein after also called a “secreted immunomodulatory protein” or SIP).

[0431] In some embodiments, the CD80 variant immunomodulatory polypeptide containing any one or more of the amino acid mutations as described herein, is secretable, such as when expressed from a cell. Such a variant CD80 immunomodulatory protein does not comprise a transmembrane domain. In some embodiments, the CD80 variant immunomodulatory protein that is secreted from the cell is a CD80-Fc fusion protein in which a variant CD80 polypeptide, such as any as described, is linked or fused, directly or indirectly, to an Fc region or domain. In some cases, the Fc region is inert and/or does not exhibit effector activity, such as any of the described Fc regions in which a wild-type Fc (e.g. IgG1) contains one or more amino acid mutations to reduce effector activity. In some cases, the Fc region is a wild-type Fc of an immunoglobulin (e.g. IgG1) and/or exhibits effector activity.

[0432] In particular embodiments, the variant CD80 immunomodulatory protein is a CD80 multivalent polypeptide, such as any as described or provided herein.

[0433] In some embodiments, the variant CD80 immunomodulatory protein comprises a signal peptide, e.g., an antibody signal peptide or other efficient signal sequence to get domains outside of cell. When the immunomodulatory protein comprises a signal peptide and is expressed by an engineered cell, the signal peptide causes the immunomodulatory protein to be secreted by the engineered cell. Generally, the signal peptide, or a portion of the signal peptide, is cleaved from the immunomodulatory protein with secretion. The immunomodulatory protein can be encoded by a nucleic acid (which can be part of an expression vector). In some embodiments, the immunomodulatory protein is expressed and secreted by a cell (such as an immune cell, for example a primary immune cell).

[0434] Thus, in some embodiments, there are provided variant CD80 immunomodulatory proteins that further comprises a signal peptide. In some embodiments, such a variant CD80 polypeptide is encoded by a nucleic acid molecule encoding an immunomodulatory protein under the operable control of a signal sequence for secretion. In some embodiments, the encoded immunomodulatory protein is secreted when expressed from a cell. In some embodiments, provided herein is a nucleic acid molecule encoding the variant CD80 immunomodulatory protein operably connected to a secretion sequence encoding the signal peptide.

[0435] A signal peptide is a sequence on the N-terminus of an immunomodulatory protein that signals secretion of the immunomodulatory protein from a cell. In some embodiments, the signal peptide is about 5 to about 40 amino acids in length (such as about 5 to about 7, about 7 to about 10, about 10 to about 15, about 15 to about 20, about 20 to about 25, or about 25 to about 30, about 30 to about 35, or about 35 to about 40 amino acids in length).

[0436] In some embodiments, the signal peptide is a native signal peptide from the corresponding wild-type CD80 (see Table 1). In some embodiments, the signal peptide is a non-native signal peptide. For example, in some embodiments, the non-native signal peptide is a mutant native signal peptide from the corresponding wild-type CD80, and can include one or more (such as 2, 3, 4, 5, 6, 7, 8, 9, or 10 or more) substitutions insertions or deletions. In some embodiments, the non-native signal peptide is a signal peptide or mutant thereof of a family member from the same IgSF family as the wild-type IgSF family member. In some embodiments, the non-native signal peptide is a signal peptide or mutant thereof from an IgSF family member from a different IgSF family that the wild-type IgSF family member. In some embodiments, the signal peptide is a signal peptide or mutant thereof from a non-IgSF protein family, such as a signal peptide from an immunoglobulin (such as IgG heavy chain or IgG-kappa light chain), a cytokine (such as interleukin-2 (IL-2), or CD33), a serum albumin protein (e.g., HSA or albumin), a human azurocidin preprotein signal sequence, a luciferase, a trypsinogen (e.g., chymotrypsinogen or trypsinogen) or other signal peptide able to efficiently secrete a protein from a cell. Exemplary signal peptides, include any described in the Table 3.

TABLE 3
Exemplary Signal Peptides

| SEQ ID | Signal | |
|---|---|---|
| NO | Peptide | Peptide Sequence |
| SEQ ID | HSA | MKWVTFISLLFLFSSAYS |
| NO: 1547 | signal | |
| | peptide | |
| SEQ ID | Ig | MDMRAPAGIFGFLLVLFPG |
| NO: 1548 | kappa | YRS |
| | light | |
| | chain | |
| SEQ ID | human | MTRLTVLALLAGLLASSRA |
| NO: 1549 | azurocidin | |
| | preprotein | |
| | signal | |
| | sequence | |
| SEQ ID | IgG | MELGLSWIFLLAILKGVQC |
| NO: 1550 | heavy | |
| | chain | |
| | signal | |
| | peptide | |
| SEQ ID | IgG | MELGLRWVFLVAILEGVQC |
| NO: 1551 | heavy | |
| | chain | |
| | signal | |
| | peptide | |
| SEQ ID | IgG | MKHLWFFLLLVAAPRWVLS |
| NO: 1552 | heavy | |
| | chain | |
| | signal | |
| | peptide | |
| SEQ ID | IgG | MDWTWRILFLVAAATGAHS |
| NO: 1553 | heavy | |
| | chain | |
| | signal | |
| | peptide | |
| SEQ ID | IgG | MDWTWRFLFVVAAATGVQS |
| NO: 1554 | heavy | |
| | chain | |
| | signal | |
| | peptide | |
| SEQ ID | IgG | MEFGLSWLFLVAILKGVQC |
| NO: 1555 | heavy | |
| | chain | |
| | signal | |
| | peptide | |
| SEQ ID | IgG | MEFGLSWVFLVALFRGVQC |
| NO: 1556 | heavy | |
| | chain | |
| | signal | |
| | peptide | |
| SEQ ID | IgG | MDLLHKNMKHLWFFLLLVA |
| NO: 1557 | heavy | APRWVLS |
| | chain | |
| | signal | |
| | peptide | |
| SEQ ID | IgG | MDMRVPAQLLGLLLLWLS |
| NO: 1558 | Kappa | GARC |
| | light | |
| | chain | |
| | signal | |
| | sequences: | |
| SEQ ID | IgG | MKYLLPTAAAGLLLLAAQ |
| NO: 1559 | Kappa | PAMA |
| | light | |
| | chain | |
| | signal | |
| | sequences: | |
| SEQ ID | Gaussia | MGVKVLFALICIAVAEA |
| NO: 1560 | luciferase | |
| SEQ ID | Human | MKWVTFISLLFLFSSAYS |
| NO: 1561 | albumin | |
| SEQ ID | Human | MAFLWLLSCWALLGTTFG |
| NO: 1562 | chymotrypsinogen | |
| SEQ ID | Human | MQLLSCIALILALV |
| NO: 1563 | interleukin-2 | |
| SEQ ID | Human | MNLLLILTFVAAAVA |
| NO: 1564 | trypsinogen-2 | |
| SEQ ID | VH | MGSTAILALLLAVLQGVSA |
| NO: : 1546 | signal | |
| | peptide | |

[0437] In some embodiments of a secretable variant CD80 immunomodulatory protein, the immunomodulatory protein comprises a signal peptide when expressed, and the signal peptide (or a portion thereof) is cleaved from the immunomodulatory protein upon secretion.

[0438] 1. Engineered Cells

[0439] Provided herein are engineered cells expressing any of the provided immunomodulatory polypeptide. In some embodiments, the engineered cells express and are capable of or are able to secrete the immunomodulatory protein from the cells under conditions suitable for secretion of the protein. In some embodiments, the immunomodulatory protein is expressed on a lymphocyte such as a tumor infiltrating lymphocyte (TIL), T-cell or NK cell, or on a myeloid cell. In some embodiments, the engineered cells are antigen presenting cells (APCs). In some embodiments, the engineered cells are engineered mammalian T-cells or engineered mammalian antigen presenting cells (APCs). In some embodiments, the engineered T-cells or APCs are human or murine cells.

[0440] In some embodiments, engineered T-cells include, but are not limited to, T helper cell, cytotoxic T-cell (alternatively, cytotoxic T lymphocyte or CTL), natural killer T-cell, regulatory T-cell, memory T-cell, or gamma delta T-cell. In some embodiments, the engineered T cells are CD4+ or CD8+. In addition to the signal of the MHC, engineered T-cells also require a co-stimulatory signal. Inn some embodiments, engineered T cells also can be modulated by inhibitory signals, which, in some cases, is provided by a variant CD80 transmembrane immunomodulatory polypeptide expressed in membrane bound form as discussed previously.

[0441] In some embodiments, the engineered APCs include, for example, MHC II expressing APCs such as macrophages, B cells, and dendritic cells, as well as artificial APCs (aAPCs) including both cellular and acellular (e.g., biodegradable polymeric microparticles) aAPCs. Artificial APCs (aAPCs) are synthetic versions of APCs that can act in a similar manner to APCs in that they present antigens to T-cells as well as activate them. Antigen presentation is performed by the MHC (Class I or Class II). In some embodiments, in engineered APCs such as aAPCs, the antigen that is loaded onto the MHC is, in some embodiments, a tumor specific antigen or a tumor associated antigen. The antigen loaded onto the MHC is recognized by a T-cell receptor (TCR) of a T cell, which, in some cases, can express CTLA-4, CD28, PD-L1 or other molecules recognized by the variant CD80 polypeptides provided herein. Materials which can be used to engineer an aAPC include: poly (glycolic acid), poly(lactic-co-glycolic acid), iron-oxide, liposomes, lipid bilayers, sepharose, and polystyrene.

[0442] In some embodiments a cellular aAPC can be engineered to contain a secreted CD80 immunomodulatory polypeptide or SIP and TCR agonist which is used in adoptive cellular therapy. In some embodiments, a cellular aAPC can be engineered to contain a SIP and TCR agonist which is used in ex vivo expansion of human T cells, such as prior to administration, e.g., for reintroduction into the patient. In some aspects, the aAPC may include expression of at least one anti-CD3 antibody clone, e.g., such as, for example, OKT3 and/or UCHT1. In some aspects, the aAPCs may be inactivated (e.g., irradiated).

[0443] In some embodiments, an immunomodulatory protein provided herein, such as a secretable immunomodulatory protein, is co-expressed or engineered into a cell that expresses an antigen-binding receptor, such as a recombinant receptor, such as a chimeric antigen receptor (CAR) or T cell receptor (TCR). In some embodiments, the engineered cell, such as an engineered T cell, recognizes a desired antigen associated with cancer, inflammatory and autoimmune disorders, or a viral infection. In specific embodiments, the antigen-binding receptor contains an antigen-binding moiety that specifically binds a tumor specific antigen or a tumor associated antigen. In some embodiments, the engineered T-cell is a CAR (chimeric antigen receptor) T-cell that contains an antigen-binding domain (e.g., scFv) that specifically binds to an antigen, such as a tumor specific antigen or tumor associated antigen. In some embodiments, the secreted CD80 immunomodulatory protein or sIP protein is expressed by an engineered T-cell receptor cell or an engineered chimeric antigen receptor cell. In such embodiments, the engineered cell co-expresses the SIP and the CAR or TCR, and secretes the SIP from the cell.

[0444] Chimeric antigen receptors (CARs) are recombinant receptors that include an antigen-binding domain (ectodomain), a transmembrane domain and an intracellular signaling region (endodomain) that is capable of inducing or mediating an activation signal to the T cell after the antigen is bound. In some example, CAR-expressing cells are engineered to express an extracellular single chain variable fragment (scFv) with specificity for a particular tumor antigen linked to an intracellular signaling part comprising an activating domain and, in some cases, a costimulatory domain. The costimulatory domain can be derived from, e.g., CD28, OX-40, 4-1BB/CD137, inducible T cell costimulator (ICOS), The activating domain can be derived from, e.g., CD3, such as CD3 zeta, epsilon, delta, gamma, or the like. In certain embodiments, the CAR is designed to have two, three, four, or more costimulatory domains. The CAR scFv can be designed to target an antigen expressed on a cell associated with a disease or condition, e.g., a tumor antigen, such as, for example, CD19, which is a transmembrane protein expressed by cells in the B cell lineage, including all normal B cells and B cell malignances, including but not limited to NHL, CLL, and non-T cell ALL. Example CAR+ T cell therapies and constructs are described in U.S. Patent Publication Nos. 2013/0287748, 2014/0227237, 2014/0099309, and 2014/0050708, and these references are incorporated by reference in their entirety.

[0445] In some aspects, the antigen-binding domain is an antibody or antigen-binding fragment thereof, such as a single chain fragment (scFv). In some embodiments, the antigen is expressed on a tumor or cancer cell. Exemplary of an antigen is CD19. Exemplary of a CAR is an anti-CD19 CAR, such as a CAR containing an anti-CD19 scFv set forth in SEQ ID NO: 1565. In some embodiments, the CAR further contains a spacer, a transmembrane domain, and an intracellular signaling domain or region comprising an ITAM signaling domain, such as a CD3zeta signaling domain. In some embodiments, the CAR further includes a costimulatory signaling domain. In some embodiments, the spacer and transmembrane domain are the hinge and transmembrane domain derived from CD8, such as having an exemplary sequence set forth in SEQ ID NO: 1566, 1567, or 1568 or a sequence of amino acids that exhibits at least 85%, 86%, 87%, 88%, 89%, 90%, 91%, 92%, 93%, 94%, 95%, 96%, 97%, 98%, 99% or more sequence identity to SEQ ID NO:332, 364, 1997. In some embodiments, the endodomain comprises at CD3-zeta signaling domain. In some embodiments, the CD3-zeta signaling domain comprises the sequence of amino acids set forth in SEQ ID NO: 1569 or a sequence of amino acids that exhibits at least 85%, 86%, 87%, 88%, 89%, 90%, 91%, 92%, 93%, 94%, 95%, 96%, 97%, 98% or 99% or more sequence identity to SEQ ID NO: 1569 and retains the activity of T cell signaling. In some embodiments, the endodomain of a CAR can further comprise a costimulatory signaling domain or region to further modulate immunomodulatory responses of the T-cell. In some embodiments, the costimulatory signaling domain is or comprises a costimulatory region, or is derived from a costimulatory region, of CD28, ICOS, 41BB or OX40. In some embodiments, the costimulatory signaling domain is a derived from CD28 or 4-1BB and comprises the sequence of amino acids set forth in any of SEQ ID NOS: 1570-1573 or a sequence of amino acids that exhibits at least 85%, 86%, 87%, 88%, 89%, 90%, 91%, 92%, 93%, 94%, 95%, 96%, 97%, 98% or 99% or more sequence identity to SEQ ID NO: 1570-1573 and retains the activity of T cell costimulatory signaling.

[0446] In some embodiments, the construct encoding the CAR further encodes a second protein, such as a marker, e.g., detectable protein, separated from the CAR by a self-cleaving peptide sequence. In some embodiments, the self-cleaving peptide sequence is an F2A, T2A, E2A or P2A self-cleaving peptide. Exemplary sequences of a T2A self-cleaving peptide are set for the in any one of SEQ ID NOS: 1574, 1575, or 1576 or a sequence of amino acids that exhibits at least 85%, 86%, 87%, 88%, 89%, 90%, 91%, 92%, 93%, 94%, 95%, 96%, 97%, 98% or 99% or more sequence identity to any of SEQ ID NOS: 1574, 1575, or 1576. In some embodiments, the T2A is encoded by the sequence of nucleotides set forth in SEQ ID NO: 1576 or a sequence that exhibits at least 85%, 86%, 87%, 88%, 89%, 90%, 91%, 92%, 93%, 94%, 95%, 96%, 97%, 98% or 99% or more sequence identity to any of SEQ ID NO: 2008. An exemplary sequence of a P2A self-cleaving peptide is set in SEQ ID NO: 1577 or a sequence of amino acids that exhibits at least 85%, 86%, 87%, 88%, 89%, 90%, 91%, 92%, 93%, 94%, 95%, 96%, 97%, 98% or 99% or more sequence identity to SEQ ID NOS: 1577. In some cases, a nucleic acid construct that encodes more than one P2A self-cleaving peptide (such as a P2A1 and P2A2), in which the nucleotide sequence P2A1 and P2A2 each encode the P2A set forth in SEQ ID NO: 1577, the nucleotide sequence may be different to avoid recombination between sequences.

[0447] In some embodiments, the marker is a detectable protein, such as a fluorescent protein, e.g., a green fluorescent protein (GFP) or blue fluorescent protein (BFP). Exemplary sequences of a fluorescent protein marker are set forth in SEQ ID NO: 1578-1582, or a sequence of amino acids that exhibits at least 85%, 86%, 87%, 88%, 89%, 90%, 91%, 92%, 93%, 94%, 95%, 96%, 97%, 98% or 99% or more sequence identity to SEQ ID NO: 1578-1582.

[0448] In some embodiments, the CAR has the sequence of amino acids set forth in any of SEQ ID NOS: 1583-1590 or a sequence of amino acids that exhibits at least 85%, 86%, 87%, 88%, 89%, 90%, 91%, 92%, 93%, 94%, 95%, 96%, 97%, 98% or 99% or more sequence identity to any one of SEQ ID NOS: 1583-1590. In some embodiments, the CAR is encoded by a sequence of nucleotides set forth in SEQ ID NO: 1591 or 1592 or a sequence of amino acids that exhibits at least 85%, 86%, 87%, 88%, 89%, 90%, 91%, 92%, 93%, 94%, 95%, 96%, 97%, 98% or 99% or more sequence identity to any one of SEQ ID NO: 1591 or 1592.

[0449] In another embodiment, the engineered T-cell possesses a TCR, including a recombinant or engineered TCR. In some embodiments, the TCR can be a native TCR. Those of skill in the art will recognize that generally native mammalian T-cell receptors comprise an alpha and a beta chain (or a gamma and a delta chain) involved in antigen specific recognition and binding. In some embodiments, the TCR is an engineered TCR that is modified. In some embodiments, the TCR of an engineered T-cell specifically binds to a tumor associated or tumor specific antigen presented by an APC. In some embodiments, the TCR is a TCR specific to HPV E6, such as described in WO 2015/009606. In some embodiments, the TCRα and TCRβ chain sequences can be constructed as part of the same expression vector in which the encoding nucleic acids are separated from each other by a sequence encoding a self-cleaving peptide, such as a P2A or T2A ribosome skip sequence.

[0450] In some embodiments, the immunomodulatory polypeptides, such as secretable immunomodulatory polypeptides, can be incorporated into engineered cells, such as engineered T cells or engineered APCs, by a variety of strategies such as those employed for recombinant host cells. A variety of methods to introduce a DNA construct into primary T cells are known in the art. In some embodiments, viral transduction or plasmid electroporation are employed. In typical embodiments, the nucleic acid molecule encoding the immunomodulatory protein, or the expression vector, comprises a signal peptide that localizes the expressed immunomodulatory proteins for secretion. In some embodiments, a nucleic acid encoding a secretable immunomodulatory protein of the invention is sub-cloned into a viral vector, such as a retroviral vector, which allows expression in the host mammalian cell. The expression vector can be introduced into a mammalian host cell and, under host cell culture conditions, the immunomodulatory protein is secreted.

[0451] In an exemplary example, primary T-cells can be purified ex vivo (CD4 cells or CD8 cells or both) and stimulated with an activation protocol consisting of various TCR/CD28 agonists, such as anti-CD3/anti-CD28 coated beads. After a 2 or 3 day activation process, a recombinant expression vector containing an immunomodulatory polypeptide can be stably introduced into the primary T cells through art standard lentiviral or retroviral transduction protocols or plasmid electroporation strategies. Cells can be monitored for immunomodulatory polypeptide expression by, for example, flow cytometry using anti-epitope tag or antibodies that cross-react with native parental molecule and polypeptides comprising variant CD80. T-cells that express the immunomodulatory polypeptide can be enriched through sorting with anti-epitope tag antibodies or enriched for high or low expression depending on the application.

[0452] Upon immunomodulatory polypeptide expression the engineered T-cell can be assayed for appropriate function by a variety of means. The engineered CAR or TCR co-expression can be validated to show that this part of the engineered T cell was not significantly impacted by the expression of the immunomodulatory protein. Once validated, standard in vitro cytotoxicity, proliferation, or cytokine assays (e.g., IFN-gamma expression) can be used to assess the function of engineered T-cells. Exemplary standard endpoints are percent lysis of the tumor line, proliferation of the engineered T-cell, or IFN-gamma protein expression in culture supernatants. An engineered construct which results in statistically significant increased lysis of tumor line, increased proliferation of the engineered T-cell, or increased IFN-gamma expression over the control construct can be selected for. Additionally, non-engineered, such as native primary or endogenous T-cells could also be incorporated into the same in vitro assay to measure the ability of the immunomodulatory polypeptide construct expressed on the engineered cells, such as engineered T-cells, to modulate activity, including, in some cases, to activate and generate effector function in bystander, native T-cells. Increased expression of activation markers such as CD69, CD44, or CD62L could be monitored on endogenous T cells, and increased proliferation and/or cytokine production could indicate desired activity of the immunomodulatory protein expressed by the engineered T cells.

[0453] In some embodiments, the similar assays can be used to compare the function of engineered T cells containing the CAR or TCR alone to those containing the CAR or TCR and a SIP construct. Typically, these in vitro assays are performed by plating various ratios of the engineered T cell and a “tumor” cell line containing the cognate CAR or TCR antigen together in culture. Standard endpoints are percent lysis of the tumor line, proliferation of the engineered T cell, or IFN-gamma production in culture supernatants. An engineered immunomodulatory protein which resulted in statistically significant increased lysis of tumor line, increased proliferation of the engineered T cell, or increased IFN-gamma production over the same TCR or CAR construct alone can be selected for. Engineered human T cells can be analyzed in immunocompromised mice, like the NSG strain, which lacks mouse T, NK and B cells. Engineered human T cells in which the CAR or TCR binds a target counter-structure on the xenograft and is co-expressed with the SIP affinity modified IgSF domain can be adoptively transferred in vivo at different cell numbers and ratios compared to the xenograft. For example, engraftment of CD19+ leukemia tumor lines containing a luciferase/GFP vector can be monitored through bioluminescence or ex vivo by flow cytometry. In a common embodiment, the xenograft is introduced into the murine model, followed by the engineered T cells several days later. Engineered T cells containing the immunomodulatory protein can be assayed for increased survival, tumor clearance, or expanded engineered T cells numbers relative to engineered T cells containing the CAR or TCR alone. As in the in vitro assay, endogenous, native (i.e., non-engineered) human T cells could be co-adoptively transferred to look for successful epitope spreading in that population, resulting in better survival or tumor clearance.

[0454] D. Nucleic Acids, Vectors and Methods for Producing the Polypeptides or Cells

[0455] Provided herein are isolated or recombinant nucleic acids collectively referred to as “nucleic acids” which encode any of the various provided embodiments of the variant CD80 polypeptides or variant CD80 IgSF domain fusion proteins provided herein. In some embodiments, nucleic acids provided herein, including all described below, are useful in recombinant production (e.g., expression) of variant CD80 polypeptides or variant CD80 IgSF domain fusion proteins provided herein. The nucleic acids provided herein can be in the form of RNA or in the form of DNA, and include mRNA, cRNA, recombinant or synthetic RNA and DNA, and cDNA. The nucleic acids provided herein are typically DNA molecules, and usually double-stranded DNA molecules. However, single-stranded DNA, single-stranded RNA, double-stranded RNA, and hybrid DNA/RNA nucleic acids or combinations thereof comprising any of the nucleotide sequences of the invention also are provided.

[0456] Also provided herein are recombinant expression vectors and recombinant host cells useful in producing the variant CD80 polypeptides or variant CD80 IgSF domain fusion proteins provided herein.

[0457] In any of the above provided embodiments, the nucleic acids encoding the variant CD80 IgSF domain fusion proteins provided herein can be introduced into cells using recombinant DNA and cloning techniques. To do so, a recombinant DNA molecule encoding an immunomodulatory polypeptide is prepared. Methods of preparing such DNA molecules are well known in the art. For instance, sequences coding for the peptides could be excised from DNA using suitable restriction enzymes. Alternatively, the DNA molecule could be synthesized using chemical synthesis techniques, such as the phosphoramidite method. Also, a combination of these techniques could be used. In some instances, a recombinant or synthetic nucleic acid may be generated through polymerase chain reaction (PCR). In some embodiments, a DNA insert can be generated encoding one or more variant CD80 polypeptides containing at least one affinity-modified IgSF domain and, in some embodiments, a multimerization domain (e.g. Fc domain) in accord with the provided description. This DNA insert can be cloned into an appropriate transduction/transfection vector as is known to those of skill in the art. Also provided are expression vectors containing the nucleic acid molecules.

[0458] In some embodiments, the expression vectors are capable of expressing the variant CD80 IgSF domain fusion proteins in an appropriate cell under conditions suited to expression of the protein. In some aspects, nucleic acid molecule or an expression vector comprises the DNA molecule that encodes the immunomodulatory protein operatively linked to appropriate expression control sequences. Methods of effecting this operative linking, either before or after the DNA molecule is inserted into the vector, are well known. Expression control sequences include promoters, activators, enhancers, operators, ribosomal binding sites, start signals, stop signals, cap signals, polyadenylation signals, and other signals involved with the control of transcription or translation.

[0459] In some embodiments, expression of the variant CD80 IgSF domain fusion protein is controlled by a promoter or enhancer to control or regulate expression. The promoter is operably linked to the portion of the nucleic acid molecule encoding the variant polypeptide or immunomodulatory protein. In some embodiments, the promotor is a constitutively active promotor (such as a tissue-specific constitutively active promotor or other constitutive promotor). In some embodiments, the promotor is an inducible promotor, which may be responsive to an inducing agent (such as a T cell activation signal).

[0460] In some embodiments, a constitutive promoter is operatively linked to the nucleic acid molecule encoding the variant polypeptide or immunomodulatory protein. Exemplary constitutive promoters include the Simian vacuolating virus 40 (SV40) promoter, the cytomegalovirus (CMV) promoter, the ubiquitin C (UbC) promoter, and the EF-1 alpha (EF1a) promoter. In some embodiments, the constitutive promoter is tissue specific. For example, in some embodiments, the promoter allows for constitutive expression of the immunomodulatory protein in specific tissues, such as immune cells, lymphocytes, or T cells. Exemplary tissue-specific promoters are described in U.S. Pat. No. 5,998,205, including, for example, a fetoprotein, DF3, tyrosinase, CEA, surfactant protein, and ErbB2 promoters.

[0461] In some embodiments, an inducible promoter is operatively linked to the nucleic acid molecule encoding the variant polypeptide or immunomodulatory protein such that expression of the nucleic acid is controllable by controlling the presence or absence of the appropriate inducer of transcription. For example, the promoter can be a regulated promoter and transcription factor expression system, such as the published tetracycline-regulated systems or other regulatable systems (see, e.g., published International PCT Appl. No. WO 01/30843), to allow regulated expression of the encoded polypeptide. An exemplary regulatable promoter system is the Tet-On (and Tet-Off) system available, for example, from Clontech (Palo Alto, Calif.). This promoter system allows the regulated expression of the transgene controlled by tetracycline or tetracycline derivatives, such as doxycycline. Other regulatable promoter systems are known (see e.g., published U.S. Application No. 2002-0168714, entitled “Regulation of Gene Expression Using Single-Chain, Monomeric, Ligand Dependent Polypeptide Switches,” which describes gene switches that contain ligand binding domains and transcriptional regulating domains, such as those from hormone receptors).

[0462] In some embodiments, the promotor is responsive to an element responsive to T-cell activation signaling. Solely by way of example, in some embodiments, an engineered T cell comprises an expression vector encoding the immunomodulatory protein and a promotor operatively linked to control expression of the immunomodulatory protein. The engineered T cell can be activated, for example by signaling through an engineered T cell receptor (TCR) or a chimeric antigen rector (CAR), and thereby triggering expression and secretion of the immunomodulatory protein through the responsive promotor.

[0463] In some embodiments, an inducible promoter is operatively linked to the nucleic acid molecule encoding the immunomodulatory protein such that the immunomodulatory protein is expressed in response to a nuclear factor of activated T-cells (NFAT) or nuclear factor kappa-light-chain enhancer of activated B cells (NF-κB). For example, in some embodiments, the inducible promoter comprises a binding site for NFAT or NF-κB. For example, in some embodiments, the promoter is an NFAT or NF-κB promoter or a functional variant thereof. Thus, in some embodiments, the nucleic acids make it possible to control the expression of immunomodulatory protein while also reducing or eliminating the toxicity of the immunomodulatory protein. In particular, engineered immune cells comprising the nucleic acids of the invention express and secrete the immunomodulatory protein only when the cell (e.g., a T-cell receptor (TCR) or a chimeric antigen receptor (CAR) expressed by the cell) is specifically stimulated by an antigen and/or the cell (e.g., the calcium signaling pathway of the cell) is non-specifically stimulated by, e.g., phorbol myristate acetate (PMA)/Ionomycin. Accordingly, the expression and, in some cases, secretion, of immunomodulatory protein can be controlled to occur only when and where it is needed (e.g., in the presence of an infectious disease-causing agent, cancer, or at a tumor site), which can decrease or avoid undesired immunomodulatory protein interactions.

[0464] In some embodiments, the nucleic acid encoding a variant CD80 IgSF domain fusion protein described herein comprises a suitable nucleotide sequence that encodes a NFAT promoter, NF-κB promoter, or a functional variant thereof. “NFAT promoter” as used herein means one or more NFAT responsive elements linked to a minimal promoter. “NF-κB promoter” refers to one or more NF-κB responsive elements linked to a minimal promoter. In some embodiments, the minimal promoter of a gene is a minimal human IL-2 promoter or a CMV promoter. The NFAT responsive elements may comprise, e.g., NFAT1, NFAT2, NFAT3, and/or NFAT4 responsive elements. The NFAT promoter, NF-κB promoter, or a functional variant thereof may comprise any number of binding motifs, e.g., at least two, at least three, at least four, at least five, or at least six, at least seven, at least eight, at least nine, at least ten, at least eleven, or up to twelve binding motifs.

[0465] The resulting recombinant expression vector having the DNA molecule thereon is used to transform an appropriate host. This transformation can be performed using methods well known in the art. In some embodiments, a nucleic acid provided herein further comprises nucleotide sequence that encodes a secretory or signal peptide operably linked to the nucleic acid encoding an immunomodulatory polypeptide such that a resultant soluble immunomodulatory polypeptide is recovered from the culture medium, host cell, or host cell periplasm. In other embodiments, the appropriate expression control signals are chosen to allow for membrane expression of an immunomodulatory polypeptide. Furthermore, commercially available kits as well as contract manufacturing companies can also be utilized to make engineered cells or recombinant host cells provided herein.

[0466] In some embodiments, the resulting expression vector having the DNA molecule thereon is used to transform, such as transduce, an appropriate cell. The introduction can be performed using methods well known in the art. Exemplary methods include those for transfer of nucleic acids encoding the receptors, including via viral, e.g., retroviral or lentiviral, transduction, transposons, and electroporation. In some embodiments, the expression vector is a viral vector. In some embodiments, the nucleic acid is transferred into cells by lentiviral or retroviral transduction methods.

[0467] Any of a large number of publicly available and well-known mammalian host cells, including mammalian T-cells or APCs, can be used in the preparing the polypeptides or engineered cells. The selection of a cell is dependent upon a number of factors recognized by the art. These include, for example, compatibility with the chosen expression vector, toxicity of the peptides encoded by the DNA molecule, rate of transformation, ease of recovery of the peptides, expression characteristics, bio-safety and costs. A balance of these factors must be struck with the understanding that not all cells can be equally effective for the expression of a particular DNA sequence.

[0468] In some embodiments, the host cells can be a variety of eukaryotic cells, such as in yeast cells, or with mammalian cells such as Chinese hamster ovary (CHO) or HEK293 cells. In some embodiments, the host cell is a suspension cell and the polypeptide is engineered or produced in cultured suspension, such as in cultured suspension CHO cells, e.g., CHO-S cells. In some examples, the cell line is a CHO cell line that is deficient in DHFR (DHFR−), such as DG44 and DUXB11. In some embodiments, the cell is deficient in glutamine synthase (GS), e.g., CHO-S cells, CHOK1 SV cells, and CHOZN((R)) GS−/− cells. In some embodiments, the CHO cells, such as suspension CHO cells, may be CHO-S-2H2 cells, CHO-S-clone 14 cells, or ExpiCHO-S cells.

[0469] In some embodiments, host cells can also be prokaryotic cells, such as with E. coli. The transformed recombinant host is cultured under polypeptide expressing conditions, and then purified to obtain a soluble protein. Recombinant host cells can be cultured under conventional fermentation conditions so that the desired polypeptides are expressed. Such fermentation conditions are well known in the art. Finally, the polypeptides provided herein can be recovered and purified from recombinant cell cultures by any of a number of methods well known in the art, including ammonium sulfate or ethanol precipitation, acid extraction, anion or cation exchange chromatography, phosphocellulose chromatography, hydrophobic interaction chromatography, and affinity chromatography. Protein refolding steps can be used, as desired, in completing configuration of the mature protein. Finally, high performance liquid chromatography (HPLC) can be employed in the final purification steps.

[0470] In some embodiments, the cell is an immune cell, such as any described above in connection with preparing engineered cells. In some embodiments, such engineered cells are primary cells. In some embodiments, the engineered cells are autologous to the subject. In some embodiment, the engineered cells are allogeneic to the subject. In some embodiments, the engineered cells are obtained from a subject, such as by leukapheresis, and transformed ex vivo for expression of the immunomodulatory polypeptide, e.g., transmembrane immunomodulatory polypeptide or secretable immunomodulatory polypeptide.

[0471] In some embodiments, the recombinant vector is a plasmid or cosmid. Plasmid or cosmid containing nucleic acid sequences encoding the variant immunomodulatory polypeptides, as described herein, is readily constructed using standard techniques well known in the art. For generation of the infectious agent, the vector or genome can be constructed in a plasmid form that can then be transfected into a packaging or producer cell line or a host bacterium. The recombinant vectors can be generated using any of the recombinant techniques known in the art. In some embodiments, the vectors can include a prokaryotic origin of replication and/or a gene whose expression confers a detectable or selectable marker such as a drug resistance for propagation and/or selection in prokaryotic systems.

[0472] In some embodiments, the recombinant vector is a viral vector. Exemplary recombinant viral vectors include a lentiviral vector genome, poxvirus vector genome, vaccinia virus vector genome, adenovirus vector genome, adenovirus-associated virus vector genome, herpes virus vector genome, and alpha virus vector genome. Viral vectors can be live, attenuated, replication conditional or replication deficient, non-pathogenic (defective), replication competent viral vector, and/or is modified to express a heterologous gene product, e.g., the variant immunomodulatory polypeptides provided herein. Vectors for generation of viruses also can be modified to alter attenuation of the virus, which includes any method of increasing or decreasing the transcriptional or translational load.

[0473] Exemplary viral vectors that can be used include modified vaccinia virus vectors (see, e.g., Guerra et al., J. Virol. 80:985-98 (2006); Tartaglia et al., AIDS Research and Human Retroviruses 8: 144547 (1992); Gheradi et al., J. Gen. Virol. 86:2925-36 (2005); Mayr et al., Infection 3:6-14 (1975); Hu et al., J. Virol. 75: 10300-308 (2001); U.S. Pat. Nos. 5,698,530, 6,998,252, 5,443,964, 7,247,615 and 7,368,116); adenovirus vector or adenovirus-associated virus vectors (see, e.g., Molin et al., J. Virol. 72:8358-61 (1998); Narumi et al., Am J. Respir. Cell Mol. Biol. 19:93641 (1998); Mercier et al., Proc. Natl. Acad. Sci. USA 101:6188-93 (2004); U.S. Pat. Nos. 6,143,290; 6,596,535; 6,855,317; 6,936,257; 7,125,717; 7,378,087; 7,550,296); retroviral vectors including those based upon murine leukemia virus (MuLV), gibbon ape leukemia virus (GaLV), ecotropic retroviruses, simian immunodeficiency virus (SIV), human immunodeficiency virus (HIV), and combinations (see, e.g., Buchscher et al., J. Virol. 66:2731-39 (1992); Johann et al., J. Virol. 66: 1635-40 (1992); Sommerfelt et al., Virology 176:58-59 (1990); Wilson et al., J. Virol. 63:2374-78 (1989); Miller et al., J. Virol. 65:2220-24 (1991); Miller et al., Mol. Cell Biol. 10:4239 (1990); Kolberg, NIH Res. 4:43 1992; Cornetta et al., Hum. Gene Ther. 2:215 (1991)); lentiviral vectors including those based upon Human Immunodeficiency Virus (HIV-1), HIV-2, feline immunodeficiency virus (FIV), equine infectious anemia virus, Simian Immunodeficiency Virus (SIV), and maedi/visna virus (see, e.g., Pfeifer et al., Annu. Rev. Genomics Hum. Genet. 2: 177-211 (2001); Zufferey et al., J. Virol. 72: 9873, 1998; Miyoshi et al., J. Virol. 72:8150, 1998; Philpott and Thrasher, Human Gene Therapy 18:483, 2007; Engelman et al., J. Virol. 69: 2729, 1995; Nightingale et al., Mol. Therapy, 13: 1121, 2006; Brown et al., J. Virol. 73:9011 (1999); WO 2009/076524; WO 2012/141984; WO 2016/011083; McWilliams et al., J. Virol. 77: 11150, 2003; Powell et al., J. Virol. 70:5288, 1996) or any, variants thereof, and/or vectors that can be used to generate any of the viruses described above. In some embodiments, the recombinant vector can include regulatory sequences, such as promoter or enhancer sequences, that can regulate the expression of the viral genome, such as in the case for RNA viruses, in the packaging cell line (see, e.g., U.S. Pat. Nos. 5,385,839 and 5,168,062).

[0474] In some aspects, nucleic acids or an expression vector comprises a nucleic acid sequence that encodes the immunomodulatory protein operatively linked to appropriate expression control sequences. Methods of affecting this operative linking, either before or after the nucleic acid sequence encoding the immunomodulatory protein is inserted into the vector, are well known. Expression control sequences include promoters, activators, enhancers, operators, ribosomal binding sites, start signals, stop signals, cap signals, polyadenylation signals, and other signals involved with the control of transcription or translation. The promoter can be operably linked to the portion of the nucleic acid sequence encoding the immunomodulatory protein. In some embodiments, the promotor is a constitutively active promotor in the target cell (such as a tissue-specific constitutively active promotor or other constitutive promotor). For example, the recombinant expression vector may also include, lymphoid tissue-specific transcriptional regulatory elements (TRE) such as a B lymphocyte, T lymphocyte, or dendritic cell specific TRE. Lymphoid tissue specific TRE are known in the art (see, e.g., Thompson et al., Mol. Cell. Biol. 12:1043-53 (1992); Todd et al., J. Exp. Med. 177:1663-74 (1993); Penix et al., J. Exp. Med. 178:1483-96 (1993)). In some embodiments, the promotor is an inducible promotor, which may be responsive to an inducing agent (such as a T cell activation signal). In some embodiments, nucleic acids delivered to the target cell in the subject, e.g., tumor cell, immune cell and/or APC, can be operably linked to any of the regulatory elements described above.

[0475] In some embodiments, the vector is a bacterial vector, e.g., a bacterial plasmid or cosmid. In some embodiments, the bacterial vector is delivered to the target cell, e.g., tumor cells, immune cells and/or APCs, via bacterial-mediated transfer of plasmid DNA to mammalian cells (also referred to as “bactofection”). In some embodiments, the delivered bacterial vector also contains appropriate expression control sequences for expression in the target cells, such as a promoter sequence and/or enhancer sequences, or any regulatory or control sequences described above. In some embodiments, the bacterial vector contains appropriate expression control sequences for expression and/or secretion of the encoded variant polypeptides in the infectious agent, e.g., the bacterium.

[0476] In some embodiments, polypeptides provided herein can also be made by synthetic methods. Solid phase synthesis is the preferred technique of making individual peptides since it is the most cost-effective method of making small peptides. For example, well known solid phase synthesis techniques include the use of protecting groups, linkers, and solid phase supports, as well as specific protection and deprotection reaction conditions, linker cleavage conditions, use of scavengers, and other aspects of solid phase peptide synthesis. Peptides can then be assembled into the polypeptides as provided herein.

### II. METHODS OF ASSESSING ACTIVITY IMMUNE MODULATION OF VARIANT CD80 IGSF DOMAIN FUSION PROTEINS

[0477] In some embodiments, the variant CD80 IgSF domain fusion proteins provided herein exhibit immunomodulatory activity to modulate T cell activation. In some embodiments, the variant CD80 IgSF domain fusion proteins modulate IFN-gamma expression in a T cell assay relative to a wild-type or unmodified CD80 control. In some cases, modulation of IFN-gamma expression can increase IFN-gamma expression relative to the control. Assays to determine specific binding and IFN-gamma expression are well-known in the art and include the MLR (mixed lymphocyte reaction) assays measuring interferon-gamma cytokine levels in culture supernatants (Wang et al., Cancer Immunol Res. 2014 September: 2(9):846-56), SEB (staphylococcal enterotoxin B) T cell stimulation assay (Wang et al., Cancer Immunol Res. 2014 September: 2(9):846-56), and anti-CD3 T cell stimulation assays (Li and Kurlander, J Transl Med. 2010: 8: 104).

[0478] In some embodiments, a variant CD80 IgSF domain fusion protein can in some embodiments, alter (e.g. increase) IFN-gamma (interferon-gamma) expression in a primary T-cell assay relative to a wild-type CD80 control. In some embodiments, a variant CD80 polypeptide or variant CD80 IgSF domain fusion protein is an antagonist of the inhibitory receptor, such as blocks an inhibitory signal in the cell that may occur to decrease response to an activating stimulus, e.g., CD3 and/or CD28 costimulatory signal or a mitogenic signal. Those of skill will recognize that different formats of the primary T-cell assay used to determine an increase or decrease in IFN-gamma expression exist.

[0479] In assaying for the ability of a variant CD80 to increase IFN-gamma expression in a primary T-cell assay, a Mixed Lymphocyte Reaction (MLR) assay can be used. In some embodiments, a variant CD80 polypeptide or variant CD80 IgSF domain fusion protein blocks activity of the CTLA-4 inhibitory receptor or PD-L1 and thereby increase MLR activity in the assay, such as observed by increased production of IFN-gamma in the assay. In some embodiments, a variant CD80 polypeptide or immunomodulatory protein exhibits agonist activity, and/or may block activity of the CTLA-4 inhibitory receptor and thereby increase MLR activity, such as increase IFN-gamma production.

[0480] Alternatively, in assaying for the ability of a variant CD80 to modulate or increase IFN-gamma expression in a primary T-cell assay, a co-immobilization assay can be used. In a co-immobilization assay, a TCR signal, provided in some embodiments by anti-CD3 antibody, is used in conjunction with a co-immobilized variant CD80 to determine the ability to increase or decrease IFN-gamma expression relative to a CD80 unmodified or wild-type control. In some embodiments, a variant CD80 polypeptide or variant CD80 IgSF domain fusion protein, e.g., CD80-Fc, increases IFN-gamma production in a co-immobilization assay.

[0481] In some embodiments, in assaying for the ability of a variant CD80 to increase IFN-gamma expression a T cell reporter assay can be used. In some embodiments, the T cell is a Jurkat T cell line or is derived from Jurkat T cell lines. In reporter assays, the reporter cell line (e.g., Jurkat reporter cell) also is generated to overexpress an inhibitory receptor that is the cognate binding partner of the variant IgSF domain polypeptide. For example, in the case of a variant CD80, the reporter cell line (e.g., Jurkat reporter cell) is generated to overexpress CTLA-4. In other examples, the reporter cell line (e.g., Jurkat reporter cell) is generated to overexpress PD-L1. In some embodiments, the reporter T cells also contain a reporter construct containing an inducible promoter responsive to T cell activation operably linked to a reporter. In some embodiments, the reporter is a fluorescent or luminescent reporter. In some embodiments, the reporter is luciferase. In some embodiments, the promoter is responsive to CD3 signaling. In some embodiments, the promoter is an NFAT promoter. In some embodiments, the promoter is responsive to costimulatory signaling, e.g., CD28 costimulatory signaling. In some embodiments, the promoter is an IL-2 promoter.

[0482] In aspects of a reporter assay, a reporter cell line is stimulated, such as by co-incubation with antigen presenting cells (APCs) expressing the wild-type ligand of the inhibitory receptor, e.g., CD80. In some embodiments, the APCs are artificial APCs. Artificial APCs are well known to a skilled artisan. In some embodiments, artificial APCs are derived from one or more mammalian cell line, such as K562, CHO or 293 cells. In some embodiments, the artificial APCs are engineered to express an anti-CD3 antibody and, in some cases, a costimulatory ligand. In some embodiments, the artificial APC is generated to overexpress the cognate binding partner of the variant IgSF domain polypeptide. For example, in the case of a variant CD80, the reporter cell line (e.g., Jurkat reporter cell) is generated to overexpress the inhibitory ligand PD-L1.

[0483] In some embodiments, the Jurkat reporter cells are co-incubated with artificial APCs overexpressing the inhibitory ligand in the presence of the variant IgSF domain molecule or immunomodulatory protein, e.g., variant CD80 polypeptide or variant CD80 IgSF domain fusion protein. In some embodiments, reporter expression is monitored, such as by determining the luminescence or fluorescence of the cells. In some embodiments, normal interactions between its inhibitory receptor and ligand result in a repression of or decrease in the reporter signal, such as compared to control, e.g., reporter expression by co-incubation of control T cells and APCs in which the inhibitory receptor and ligand interaction is not present, e.g., APCs that do not overexpress CD80. In certain embodiments provided herein, a variant CD80 polypeptide or immunomodulatory protein mediates CD28 agonism, such as such as PD-L1-dependent CD28 costimulation, e.g. when provided in soluble form as a variant CD80-Fc, thereby resulting in an increase of the reporter signal compared to the absence of the variant CD80 polypeptide or immunomodulatory protein. In some cases, certain formats of a variant CD80 polypeptide or immunomodulatory protein as provided herein may provide a blocking activity of an inhibitory receptor, thereby increasing reporter expression compared to the absence of the variant CD80 polypeptide or immunomodulatory protein.

[0484] Use of proper controls is known to those of skill in the art, however, in the aforementioned embodiments, a control typically involves use of the unmodified CD80, such as a wild-type of native CD80 isoform from the same mammalian species from which the variant CD80 was derived or developed. In some embodiments, the wild-type or native CD80 is of the same form or corresponding form as the variant. For example, if the variant CD80 is a soluble form containing a variant ECD fused to an Fc protein, then the control is a soluble form containing the wild-type or native ECD of CD80 fused to the Fc protein. Irrespective of whether the binding affinity to either one or more of CD28, CTLA-4 and PD-L1 is increased or decreased, a variant CD80 in some embodiments will increase IFN-gamma expression in a T-cell assay relative to a wild-type CD80 control.

[0485] In some embodiments, a variant CD80 polypeptide or immunomodulatory protein, increases IFN-gamma expression (i.e., protein expression) relative to a wild-type or unmodified CD80 control by at least: 5%, 10%, 20%, 30%, 40%, 50%, 60%, 70%, 80%, 90%, or higher. In some embodiments, the wild-type CD80 control is murine CD80, such as would typically be used for a variant CD80 altered in sequence from that of a wild-type murine CD80 sequence. In some embodiments, the wild-type CD80 control is human CD80, such as would typically be used for a variant CD80 altered in sequence from that of a corresponding wild-type human CD80 sequence such as an CD80 sequence comprising the sequence of amino acids of SEQ ID NO: 1, SEQ ID NO: 2 or SEQ ID NO: 76 or SEQ ID NO:150 or SEQ ID NO: 1245.

### III. PHARMACEUTICAL FORMULATIONS, ADMINISTRATION, AND ARTICLES OF MANUFACTURE OR KITS

[0486] Provided herein are compositions containing any of the variant CD80 polypeptides or variant CD80 IgSF domain fusion proteins described herein. The pharmaceutical composition can further comprise a pharmaceutically acceptable excipient. For example, the pharmaceutical composition can contain one or more excipients for modifying, maintaining or preserving, for example, the pH, osmolarity, viscosity, clarity, color, isotonicity, odor, sterility, stability, rate of dissolution or release, adsorption, or penetration of the composition. In some aspects, a skilled artisan understands that a pharmaceutical composition containing cells may differ from a pharmaceutical composition containing a protein.

[0487] In some embodiments, the pharmaceutical composition is a solid, such as a powder, capsule, or tablet. For example, the components of the pharmaceutical composition can be lyophilized. In some embodiments, the solid pharmaceutical composition is reconstituted or dissolved in a liquid prior to administration.

[0488] In some embodiments, the pharmaceutical composition is a liquid, for example variant CD80 polypeptides dissolved in an aqueous solution (such as physiological saline or Ringer's solution). In some embodiments, the pH of the pharmaceutical composition is between about 4.0 and about 8.5 (such as between about 4.0 and about 5.0, between about 4.5 and about 5.5, between about 5.0 and about 6.0, between about 5.5 and about 6.5, between about 6.0 and about 7.0, between about 6.5 and about 7.5, between about 7.0 and about 8.0, or between about 7.5 and about 8.5).

[0489] In some embodiments, the pharmaceutical composition comprises a pharmaceutically-acceptable excipient, for example a filler, binder, coating, preservative, lubricant, flavoring agent, sweetening agent, coloring agent, a solvent, a buffering agent, a chelating agent, or stabilizer. Examples of pharmaceutically-acceptable fillers include cellulose, dibasic calcium phosphate, calcium carbonate, microcrystalline cellulose, sucrose, lactose, glucose, mannitol, sorbitol, maltol, pregelatinized starch, corn starch, or potato starch. Examples of pharmaceutically-acceptable binders include polyvinylpyrrolidone, starch, lactose, xylitol, sorbitol, maltitol, gelatin, sucrose, polyethylene glycol, methyl cellulose, or cellulose. Examples of pharmaceutically-acceptable coatings include hydroxypropyl methylcellulose (HPMC), shellac, corn protein zein, or gelatin. Examples of pharmaceutically-acceptable disintegrants include polyvinylpyrrolidone, carboxymethyl cellulose, or sodium starch glycolate. Examples of pharmaceutically-acceptable lubricants include polyethylene glycol, magnesium stearate, or stearic acid. Examples of pharmaceutically-acceptable preservatives include methyl parabens, ethyl parabens, propyl paraben, benzoic acid, or sorbic acid. Examples of pharmaceutically-acceptable sweetening agents include sucrose, saccharine, aspartame, or sorbitol. Examples of pharmaceutically-acceptable buffering agents include carbonates, citrates, gluconates, acetates, phosphates, or tartrates.

[0490] In some embodiments, the pharmaceutical composition further comprises an agent for the controlled or sustained release of the product, such as injectable microspheres, bio-erodible particles, polymeric compounds (polylactic acid, polyglycolic acid), beads, or liposomes.

[0491] In some embodiments, the pharmaceutical composition is sterile. Sterilization may be accomplished by filtration through sterile filtration membranes or radiation. Where the composition is lyophilized, sterilization using this method may be conducted either prior to or following lyophilization and reconstitution. The composition for parenteral administration may be stored in lyophilized form or in solution. In addition, parenteral compositions generally are placed into a container having a sterile access port, for example, an intravenous solution bag or vial having a stopper pierceable by a hypodermic injection needle.

[0492] In some embodiments, the compositions may comprise buffers such as neutral buffered saline, phosphate buffered saline and the like; carbohydrates such as glucose, mannose, sucrose or dextrans, mannitol; proteins; polypeptides or amino acids such as glycine; antioxidants; chelating agents such as EDTA or glutathione; adjuvants (e.g., aluminum hydroxide); and preservatives.

[0493] A pharmaceutically acceptable carrier may be a pharmaceutically acceptable material, composition, or vehicle that is involved in carrying or transporting cells of interest from one tissue, organ, or portion of the body to another tissue, organ, or portion of the body. For example, the carrier may be a liquid or solid filler, diluent, excipient, solvent, or encapsulating material, or some combination thereof. Each component of the carrier must be “pharmaceutically acceptable” in that it must be compatible with the other ingredients of the formulation. It also must be suitable for contact with any tissue, organ, or portion of the body that it may encounter, meaning that it must not carry a risk of toxicity, irritation, allergic response, immunogenicity, or any other complication that excessively outweighs its therapeutic benefits.

### IV. THERAPEUTIC APPLICATIONS

[0494] Provided herein are methods for using and uses of the provided molecules containing a variant CD80 IgSF domain fusion protein described herein and pharmaceutical compositions containing the same. Such methods and uses include methods for modulating an immune response, including in connection with treating a disease or condition in a subject, such as in a human patient. Included among such molecules in the methods for using and uses herein are formats in which an extracellular domain or portion thereof of a CD80 variant polypeptide containing an affinity modified IgSF domain (e.g. IgV) is linked, directly or indirectly, to a multimerization domain, e.g. an Fc domain or region.

[0495] In particular embodiments, the full extracellular domain containing the IgV and IgC domains are linked to the multimerization domain, e.g. an Fc domain or region. In some embodiments, such a therapeutic agent is a variant CD80-Fc fusion protein, such as a variant CD80 IgV-Fv fusion protein.

[0496] In other particular embodiments as described, the Fc domain or region has effector activity. In some embodiments, such a therapeutic agent is a variant CD80-Fc fusion protein, such as a variant CD80 ECD-Fc fusion protein

[0497] In some aspects, such methods and uses include therapeutic methods and uses, for example, involving administration of the molecules or compositions containing the same, to a subject having a disease or condition in need of treatment thereof. The pharmaceutical compositions described herein (including pharmaceutical composition comprising the variant CD80 IgSF domain fusion proteins) can be used in a variety of therapeutic applications, such as for the treatment of a tumor or a cancer in a subject, viral infection or bacterial infection. In some embodiments, the disease or condition is a cancer. In some embodiments, the molecule, cell, and/or composition is administered in an effective amount to effect treatment of the disease or disorder. Uses include uses of the variant CD80 IgSF domain fusion proteins, alone or as a combination therapy as described, in such methods and treatments, and in the preparation of a medicament in order to carry out such therapeutic methods. In some embodiments, the methods are carried out by administering the variant CD80 IgSF domain fusion proteins, or compositions comprising the same, to the subject having or suspected of having the disease or condition. In some embodiments, the methods thereby treat the disease or condition or disorder in the subject.

[0498] In some aspects, the molecules or compositions pharmaceutical composition can modulate, such as increase, an immune response to treat the disease. In some embodiments, the methods carried out with a variant CD80 IgSF domain fusion protein as described increases an immune response in a subject. Among the provided methods are methods involving delivery of variant CD80 IgSF domain fusion proteins with increased affinity for CD28, which can agonize signaling of the stimulatory signal and/or increased affinity for PD-L1 and/or CTLA-4, which can antagonize signaling of an inhibitory receptor, such as block an inhibitory signal in the cell that may occur to decrease response to an activating stimulus, e.g., CD3 and/or CD28 costimulatory signal or a mitogenic signal. In some cases, the result of this can be to increase the immune response. In some embodiments, agonism of CD28, which can be dependent on or enhanced by Fc binding, may be useful to promote immunity in oncology, such as for treatment of tumors or cancers. In some embodiments, the agonism of CD28 and antagonism of PD-L1 may be useful to promote immunity in oncology, such as for treatment of tumors or cancers. In some embodiments, the agonism of CD28 and antagonism of CTLA-4 may be useful to promote immunity in oncology, such as for treatment of tumors or cancers. In some embodiments, the agonism of CD28 and antagonism of PD-L1 and CTLA-4 may be useful to promote immunity in oncology, such as for treatment of tumors or cancers.

[0499] Among the provided methods are methods involving delivery of variant CD80 IgSF domain fusion proteins which, in some embodiments, have increased affinity for CTLA-4 and/or PD-L1, which can antagonize signaling of an inhibitory receptor, such as block an inhibitory signal in the cell that may occur to decrease response to an activating stimulus, e.g., CD3 and/or CD28 costimulatory signal or a mitogenic signal. In certain cases, a variant CD80 IgSF fusion protein is capable of binding the PD-L1 on a tumor cell or APC, thereby blocking the interaction of PD-L1 and the PD-1 inhibitory receptor to prevent the negative regulatory signaling that would have otherwise resulted from the PD-L1/PD-1 interaction. In some cases, the result of this can be to increase the immune response. In other embodiments, the provided variant CD80 IgSF domain fusion proteins exhibit activity to bind CD28, in some cases with increased affinity. In some embodiments, binding to CD28 can agonize signaling of the stimulatory signal, particularly dependent on or enhanced by CD80 co-binding to PD-L1. In some embodiments, the agonism of CD28 is by PD-L1 dependent CD28 costimulation. Such PD-L1-dependent costimulation does not require an Fc with effector function and can be mediated by an Fc fusion protein containing an effector-less or inert Fc molecule. In some cases, such variant CD80 polypeptides also can facilitate promotion of an immune response in connection with the provided therapeutic methods by blocking the PD-L1/PD-1 interaction while also binding and co-stimulating a CD28 receptor on a localized T cell. In some embodiments, the agonism of CD28 and/or antagonism of CTLA-4 or PD-L1/PD-1 may be useful to promote immunity in oncology, such as for treatment of tumors or cancers.

[0500] In some embodiments, the pharmaceutical composition can be used to inhibit growth of mammalian cancer cells (such as human cancer cells). A method of treating cancer can include administering an effective amount of any of the pharmaceutical compositions described herein to a subject with cancer. The effective amount of the pharmaceutical composition can be administered to inhibit, halt, or reverse progression of cancers. Human cancer cells can be treated in vivo, or ex vivo. In ex vivo treatment of a human patient, tissue or fluids containing cancer cells are treated outside the body and then the tissue or fluids are reintroduced back into the patient. In some embodiments, the cancer is treated in a human patient in vivo by administration of the therapeutic composition into the patient. Thus, the present invention provides ex vivo and in vivo methods to inhibit, halt, or reverse progression of the tumor, or otherwise result in a statistically significant increase in progression-free survival (i.e., the length of time during and after treatment in which a patient is living with cancer that does not get worse), or overall survival (also called “survival rate;” i.e., the percentage of people in a study or treatment group who are alive for a certain period of time after they were diagnosed with or treated for cancer) relative to treatment with a control.

[0501] The cancers that can be treated by the pharmaceutical compositions and the treatment methods described herein include, but are not limited to, melanoma, bladder cancer, hematological malignancies (leukemia, lymphoma, myeloma), liver cancer, brain cancer, renal cancer, breast cancer, pancreatic cancer (adenocarcinoma), colorectal cancer, lung cancer (small cell lung cancer and non-small-cell lung cancer), spleen cancer, cancer of the thymus or blood cells (i.e., leukemia), prostate cancer, testicular cancer, ovarian cancer, uterine cancer, gastric carcinoma, a musculoskeletal cancer, a head and neck cancer, a gastrointestinal cancer, a germ cell cancer, or an endocrine and neuroendocrine cancer. In some embodiments, the cancer is Ewing's sarcoma. In some embodiments, the cancer is selected from melanoma, lung cancer, bladder cancer, and a hematological malignancy. In some embodiments, the cancer is a lymphoma, lymphoid leukemia, myeloid leukemia, cervical cancer, neuroblastoma, or multiple myeloma. In some embodiments, the cancer is selected from melanoma, non-small cell lung cancer (NSCLC), renal cell carcinoma (RCC), gastric cancer, bladder cancer, diffuse large B-cell lymphoma (DLBCL), Hodgkin's lymphoma, ovarian cancer, head & neck squamous cell cancer (HNSCC), mesothelioma, and triple negative breast cancer (TNBC). In some embodiments, the cancer is selected from melanoma, gastric cancer, head & neck squamous cell cancer (HNSCC), non-small cell lung cancer (NSCLC), and triple negative breast cancer (TNBC).

[0502] In some embodiments, the pharmaceutical composition (including pharmaceutical composition comprising a variant CD80 polypeptide such as variant CD80 IgSF domain fusion proteins) is administered as a monotherapy (i.e., as a single agent) or as a combination therapy (i.e., in combination with one or more additional anticancer agents, such as a chemotherapeutic drug, a cancer vaccine, or an immune checkpoint inhibitor).

[0503] In some embodiments, the pharmaceutical composition (including pharmaceutical composition comprising a variant CD80 polypeptide such as a variant CD80 IgSF domain fusion proteins) is administered in combination with an immune checkpoint inhibitor. Immune checkpoint inhibitors can include agents that specifically bind to a checkpoint molecule other than PD-L1, such as a molecule selected from among CD25, PD-1, PD-L2, CTLA-4, LAG-3, TIM-3, 4-1BB, GITR, CD40, CD40L, OX40, OX40L, CXCR2, B7-H3, B7-H4, BTLA, HVEM, CD28 and VISTA. In some embodiments, the immune checkpoint inhibitor is and antibody or antigen-binding fragment, a small molecule or a polypeptide. In some embodiments, the pharmaceutical composition is administered in combination with a PD-1 inhibitor, such as an anti-PD-1 antibody. In some embodiments, the pharmaceutical composition is administered in combination with a CTLA-4 inhibitor, such as an anti-CTLA-4 antibody.

[0504] In some embodiments, the pharmaceutical composition (including pharmaceutical composition comprising a variant CD80 polypeptide such as a variant CD80 IgSF domain fusion proteins) is administered as a combination therapy with radiation chemotherapy.

[0505] In some embodiments, the pharmaceutical composition (including pharmaceutical composition comprising a variant CD80 polypeptide such as a variant CD80 IgSF domain fusion proteins) is administered in combination with one or more chemotherapeutic agents. Exemplary chemotherapeutic agents that may be combined with the in methods provided herein include, but are not limited to, capectiabine, cyclophosphamide, dacarbazine, temozolomide, cyclophosphamide, docetaxel, doxorubicin, daunorubicin, cisplatin, carboplatin, epirubicin, eribulin, 5-FU, gemcitabine, irinotecan, ixabepilone, methotrexate, mitoxantrone, oxaliplatin, paclitaxel, nab-paclitaxel, ABRAXANE (Registered trademark) (protein-bound paclitaxel), pemetrexed, vinorelbine, and vincristine.

[0506] In some embodiments, the provided method, including provided combination therapy methods, enhances an immune response in the subject. In some embodiments, the provided methods, including the provided combination therapy methods, results in activation of T cells in the subject. In some embodiments, the provided methods, including provided combination therapy methods, reduces tumor size in a subject with cancer. In some embodiments, the provided methods, including provided combination therapy methods, can result in or achieve a reduction in size for a tumor or an eradication of tumors. In some embodiments, the mammal is a human.

[0507] The efficacy of the provided therapeutic methods, including combination therapy, can be evaluated according to guidelines that provide an objective response criteria for evaluating anti-tumor therapeutics. Such guidelines are known to a skilled artisan. For example, published guidelines include those published by the World Health Organization (WHO) (see World Health Organization, “WHO Handbook for Reporting Results of Cancer Treatment,” (1979) WHO Offset Publication No. 48, Geneva pp. 1-45 and Miller et al., (1981) Cancer. 47:207-214), and those published as Response Evaluation Criteria in Solid Tumors (RECIST) (Eisenhauer et al, (2009) Eur J Cancer. 45(2):228-247). These guidelines are provided to define when tumors in cancer patients improve (“respond”), stay the same (“stabilize”), or worsen (“progress”) during treatments. The tumors can be measured by any reproducible method. For example, CT (computed tomography) or MRI (magnetic resonance imaging) with cuts of 10 mm or less in slice thickness, or spiral CT using a 5 mm continuous reconstruction algorithm, can be used to measure tumor size. In some examples, the tumors can be measured by chest X-ray or ultrasound. It can also be possible to measure tumors using endoscopy or laparoscopy.

[0508] A variety of means are known for determining if administration of a therapeutic composition of the invention sufficiently modulates immunological activity by inducing, generating, or turning on immune cells that mediate or are capable of mediating a protective immune response; changing the physical or functional properties of immune cells; or a combination of these effects. Examples of measurements of the modulation of immunological activity include, but are not limited to, examination of the presence or absence of immune cell populations (using flow cytometry, immunohistochemistry, histology, electron microscopy, polymerase chain reaction (PCR)); measurement of the functional capacity of immune cells including ability or resistance to proliferate or divide in response to a signal (such as using T-cell proliferation assays and pepscan analysis based on 3H-thymidine incorporation following stimulation with anti-CD3 antibody, anti-T-cell receptor antibody, anti-CD28 antibody, calcium ionophores, PMA (phorbol 12-myristate 13-acetate) antigen presenting cells loaded with a peptide or protein antigen; B cell proliferation assays); measurement of the ability to kill or lyse other cells (such as cytotoxic T cell assays); measurements of the cytokines, chemokines, cell surface molecules, antibodies and other products of the cells (e.g., by flow cytometry, enzyme-linked immunosorbent assays, Western blot analysis, protein microarray analysis, immunoprecipitation analysis); measurement of biochemical markers of activation of immune cells or signaling pathways within immune cells (e.g., Western blot and immunoprecipitation analysis of tyrosine, serine or threonine phosphorylation, polypeptide cleavage, and formation or dissociation of protein complexes; protein array analysis; DNA transcriptional, profiling using DNA arrays or subtractive hybridization); measurements of cell death by apoptosis, necrosis, or other mechanisms (e.g., annexin V staining, TUNEL assays, gel electrophoresis to measure DNA laddering, histology; fluorogenic caspase assays, Western blot analysis of caspase substrates); measurement of the genes, proteins, and other molecules produced by immune cells (e.g., Northern blot analysis, polymerase chain reaction, DNA microarrays, protein microarrays, 2-dimensional gel electrophoresis, Western blot analysis, enzyme linked immunosorbent assays, flow cytometry); and measurement of clinical symptoms or outcomes for example, by measuring relapse rate or disease severity (using clinical scores known to the ordinarily skilled artisan).

[0509] A. Dosing and Administration

[0510] In some embodiments, a pharmaceutical composition described herein (including pharmaceutical composition comprising the variant CD80 IgSF domain fusion proteins) is administered to a subject. Generally, dosages and routes of administration of the pharmaceutical composition are determined according to the size and condition of the subject, according to standard pharmaceutical practice. For example, the therapeutically effective dose can be estimated initially either in cell culture assays or in animal models such as mice, rats, rabbits, dogs, pigs, or monkeys. An animal model may also be used to determine the appropriate concentration range and route of administration. Such information can then be used to determine useful doses and routes for administration in humans. The exact dosage can be determined in light of factors related to the subject requiring treatment. Dosage and administration can be adjusted to provide sufficient levels of the active compound or to maintain the desired effect. Factors that may be taken into account include the severity of the disease state, the general health of the subject, the age, weight, and gender of the subject, time and frequency of administration, drug combination(s), reaction sensitivities, and response to therapy.

[0511] In some embodiments, modeling and simulation of pharmacokinetic (PK) and pharmacodynamic (PD) profiles observed in control animals and animal models of disease (e.g., cancer models) can be used to predict or determine patient dosing. For example, PK data from non-human primates (e.g., cynomolgus monkeys) can be used to estimate human PK. Similarly, mouse PK and PD data can be used to predict human dosing. The observed animal data can be used to inform computational models which can be used to simulate human dose response. In some embodiments, transduction models, such as signal distribution models (SDM; Lobo E D et al., AAPS PharmSci. 2002; 4(4): E42) or cell distribution models (CDM; Yang J et al., AAPS J. 2010; 12(1):1-10) can be informed by such PK and PD animal data (see, e.g., Example 26) and used to predict human dosing and response. In some embodiments, transduction models, such as SDM, can be used to predict human dosing and administration. In some embodiments, transduction models, such as SDM, can be used to develop immuno-oncology therapies, such as therapies including treatment with variant CD80 fusion proteins described herein. In some embodiments, the model is an SDM. In some embodiments, the model is a CDM. In some embodiments, transduction models, such as SDM, can be used to determine tumor static concentration (TSC), which refers to the minimum drug concentration where the tumor is neither growing nor regressing. In some embodiments, TSC can be used, for example alone or in combination with PK data, to determine (e.g., predict) human dosing. For example, to induce tumor growth inhibition, human dosing may be higher or delivered in a regimen that results in the drug concentration exceeding the predicted TSC.

[0512] Long-acting pharmaceutical compositions may be administered every 3 to 4 days, every week, biweekly, every three weeks, once a month, etc. depending on the half-life and clearance rate of the particular formulation. The frequency of dosing will depend upon the pharmacokinetic parameters of the molecule in the formulation used. Typically, a composition is administered until a dosage is reached that achieves the desired effect. The composition may therefore be administered as a single dose, or as multiple doses (at the same or different concentrations/dosages) over time, or as a continuous infusion. Further refinement of the appropriate dosage is routinely made. Appropriate dosages may be ascertained through use of appropriate dose-response data. A number of biomarkers or physiological markers for therapeutic effect can be monitored including T cell activation or proliferation, cytokine synthesis or production (e.g., production of TNF-α, IFN-γ, IL-2), induction of various activation markers (e.g., CD25, IL-2 receptor), inflammation, joint swelling or tenderness, serum level of C-reactive protein, anti-collagen antibody production, and/or T cell-dependent antibody response(s).

[0513] Typically, precise amount of the compositions of the present invention to be administered can be determined by a physician with consideration of individual differences in age, weight, tumor size, extent of infection or metastasis, and condition of the patient (subject). In some embodiments, when referencing dosage based on mg/kg of the subject, an average human subject is considered to have a mass of about 70 kg-75 kg, such as 70 kg and a body surface area (BSA) of 1.73 m².

[0514] In some embodiments, the dosage, such as to achieve a therapeutically effective amount, of the pharmaceutical composition (including pharmaceutical composition comprising the variant CD80 IgSF domain fusion proteins) is a single dose or a repeated dose, such as via administration of multiple doses. In some embodiments, the doses are given to a subject once per day, twice per day, three times per day, or four or more times per day. In some embodiments, about 1 or more (such as about 2 or more, about 3 or more, about 4 or more, about 5 or more, about 6 or more, or about 7 or more) doses are given in a week. In some embodiments, multiple doses are given over the course of days, weeks, months, or years. In some embodiments, a course of treatment is about 1 or more doses (such as about 2 or more doses, about 3 or more doses, about 4 or more doses, about 5 or more doses, about 7 or more doses, about 10 or more doses, about 15 or more doses, about 25 or more doses, about 40 or more doses, about 50 or more doses, or about 100 or more doses).

[0515] In some embodiments, an administered dose of the pharmaceutical composition (including pharmaceutical composition comprising the variant CD80 IgSF domain fusion proteins) is about 1 μg of protein per kg subject body mass or more (such as about 2 μg of protein per kg subject body mass or more, about 5 μg of protein per kg subject body mass or more, about 10 μg of protein per kg subject body mass or more, about 25 μg of protein per kg subject body mass or more, about 50 μg of protein per kg subject body mass or more, about 100 μg of protein per kg subject body mass or more, about 250 μg of protein per kg subject body mass or more, about 500 μg of protein per kg subject body mass or more, about 1 mg of protein per kg subject body mass or more, about 2 mg of protein per kg subject body mass or more, or about 5 mg of protein per kg subject body mass or more).

[0516] In some embodiments, the pharmaceutical composition (including pharmaceutical composition comprising the variant CD80 IgSF domain fusion proteins) is administered to a subject through any route, including orally, transdermally, by inhalation, intravenously, intra-arterially, intramuscularly, direct application to a wound site, application to a surgical site, intraperitoneally, by suppository, subcutaneously, intradermally, transcutaneously, by nebulization, intrapleurally, intraventricularly, intra-articularly, intraocularly, intraspinally, intratumorally or systemically.

[0517] In some embodiments, the pharmaceutical composition (including pharmaceutical composition comprising the variant CD80 IgSF domain fusion proteins) is administered parenterally. Examples provided herein demonstrate that particularly suitable routes of administration include intravenous, subcutaneous or intratumoral administration. In some embodiments, the pharmaceutical composition is in a form suitable for administration by injection, such as by bolus injection. In some embodiments, the pharmaceutical composition is in a form suitable for infusion injection, for example by intravenous injection. In some embodiments, the infusion duration is, is at least, or is about 30 minutes, 40 minutes, 50 minutes, 1 hour, 1.5 hours, 2 hours, 3 hours, 4 hours, 5 hours or 6 hours. In some embodiments the infusion duration is between about 30 minutes and 6 hours. In some embodiments, the infusion duration is between about 30 minutes and 5 hours. In some embodiments, the infusion duration is between about 30 minutes and 4 hours. In some embodiments, the infusion duration is between about 30 minutes and 3 hours. In some embodiments, the infusion duration is between about 30 minutes and 2 hours. In some embodiments, the infusion duration is between about 30 minutes and 1 hour. In some embodiments, the infusion duration is or is about 30 minutes.

[0518] In some embodiments, a pharmaceutical composition (including a pharmaceutical composition comprising the variant CD80 IgSF domain fusion proteins) is administered in a therapeutically effective amount to treat a cancer in a subject that is known or suspected of having a cancer. In some embodiments, the therapeutically effective amount is between about 0.001 mg/kg and about 100 mg/kg, inclusive. In some embodiments, the therapeutically effective amount is between about 0.003 mg/kg and about 80 mg/kg, inclusive. In some embodiments, the therapeutically effective amount is between about 0.5 mg/kg and about 60 mg/kg, inclusive. In some embodiments, the therapeutically effective amount is between about 1 mg/kg and about 60 mg/kg, inclusive. In some embodiments, the therapeutically effective amount is between about 1 mg/kg and about 40 mg/kg, inclusive. In some embodiments, the therapeutically effective amount is between about 1 mg/kg and about 20 mg/kg, inclusive.

[0519] In some embodiments, a pharmaceutical composition (including pharmaceutical composition comprising the variant CD80 IgSF domain fusion proteins) is administered in a therapeutically effective amount to treat a cancer in a subject that is known or suspected of having a cancer. In some embodiments, the therapeutically effective amount is an amount between or between about 1 mg/kg and 10 mg/kg, inclusive, such as between or between about 1 mg/kg and 8 mg/kg, between or between about 1 mg/kg and 6 mg/kg, between or between about 1 mg/kg and 4 mg/kg, between or between about 1 mg/kg and 2 mg/kg, between or between about 2 mg/kg an 10 mg/kg, between or between about 2 mg/kg and 8 mg/kg, between or between about 2 mg/kg and 6 mg/kg, between or between about 2 mg/kg and 4 mg/kg, between or between about 4 mg/kg and 10 mg/kg, between or between about 4 mg/kg and 8 mg/kg, between or between about 4 mg/kg and 6 mg/kg, between or between about 6 mg/kg and 10 mg/kg, between or between about 6 mg/kg and 8 mg/kg or between or between about 8 mg/kg and 10 mg/kg, each inclusive.

[0520] In some embodiments, the therapeutically effective amount is the amount, e.g., amount of variant CD80 fusion protein as described herein, needed to saturate at least 16% of CD28 receptors. In some embodiments, the therapeutically effective amount is the amount, e.g., amount of variant CD80 fusion protein as described herein, needed to saturate at least 20% of CD28 receptors. In some embodiments, the therapeutically effective amount is the amount, e.g., amount of variant CD80 fusion protein as described herein, needed to saturate at least 30% of CD28 receptors. In some embodiments, the therapeutically effective amount is the amount, e.g., amount of variant CD80 fusion protein as described herein, needed to saturate at least 40% of CD28 receptors. In some embodiments, the therapeutically effective amount is the amount, e.g., amount of variant CD80 fusion protein as described herein, needed to saturate at least 50% of CD28 receptors. In some embodiments, the therapeutically effective amount is the amount, e.g., amount of variant CD80 fusion protein as described herein, needed to saturate at least 60% of CD28 receptors. In some embodiments, the therapeutically effective amount is the amount, e.g., amount of variant CD80 fusion protein as described herein, needed to saturate at least 70% of CD28 receptors. In some embodiments, the therapeutically effective amount is the amount, e.g., amount of variant CD80 fusion protein as described herein, needed to saturate at least 80% of CD28 receptors. In some embodiments, the therapeutically effective amount is the amount, e.g., amount of variant CD80 fusion protein as described herein, needed to saturate at least 90% of CD28 receptors. In some embodiments, the therapeutically effective amount is the amount, e.g., amount of variant CD80 fusion protein as described herein, needed to saturate at least 95% of CD28 receptors. In some embodiments, the therapeutically effective amount is the amount, e.g., amount of variant CD80 fusion protein as described herein, needed to saturate at least 99% of CD28 receptors.

[0521] In some embodiments, the pharmaceutical composition (including pharmaceutical composition comprising the variant CD80 IgSF domain fusion proteins) is in a form suitable for administration by intratumoral delivery. In some aspects, a dosage amount for intratumoral delivery is less than the amount administered by injection or other parenteral routes.

[0522] In some embodiments the therapeutically effective amount of a pharmaceutical composition (including pharmaceutical composition comprising the variant CD80 IgSF domain fusion proteins) for intratumoral administration is an amount between or between about 0.1 mg/kg and 1 mg/kg, inclusive, such as between or between about 0.1 mg/kg and 0.8 mg/kg, between or between about 0.1 mg/kg and 0.6 mg/kg, between or between about 0.1 mg/kg and 0.4 mg/kg, between or between about 0.1 mg/kg and 0.2 mg/kg, between or between about 0.2 mg/kg an 1 mg/kg, between or between about 0.2 mg/kg and 0.8 mg/kg, between or between about 0.2 mg/kg and 0.6 mg/kg, between or between about 0.2 mg/kg and 0.4 mg/kg, between or between about 0.4 mg/kg and 1 mg/kg, between or between about 0.4 mg/kg and 0.8 mg/kg, between or between about 0.4 mg/kg and 0.6 mg/kg, between or between about 0.6 mg/kg and 1 mg/kg, between or between about 0.6 mg/kg and 0.8 mg/kg or between or between about 0.8 mg/kg and 1 mg/kg, each inclusive.

[0523] In some embodiments, the therapeutically effective amount of a pharmaceutical composition (including pharmaceutical composition comprising the variant CD80 IgSF domain fusion proteins) is administered as a single dose.

[0524] In some embodiments, the therapeutically effective amount of a pharmaceutical composition (including pharmaceutical composition comprising the variant CD80 IgSF domain fusion proteins) is administered as multiple doses, such as two or more doses, for example, 2, 3, 4, 5 or 6 doses. In some embodiments, the therapeutically effective amount of a pharmaceutical composition (including pharmaceutical composition comprising the variant CD80 IgSF domain fusion proteins) is administered in six or fewer multiple doses. In some embodiments, the therapeutically effective amount of a pharmaceutical composition is administered as two doses. In some embodiments, the therapeutically effective amount of a pharmaceutical composition is administered as three doses. In some embodiments, the therapeutically effective amount of a pharmaceutical composition is administered as four doses. In some embodiments, the therapeutically effective amount of a pharmaceutical composition is administered as five doses. In some embodiments, the therapeutically effective amount of a pharmaceutical composition is administered as six doses. In some embodiments, the multiple doses are administered at least or about at least one week apart. In some embodiments, the doses are administered once weekly (QW or Q1W), once every 2 weeks (Q2W), once every 3 weeks (Q3W) or once every 4 weeks (Q4W). In some embodiments, the interval between each administered dose is or is about one week. In some embodiments, the interval between each administered dose or is is about 2 weeks. In some embodiments, the interval between each administered dose is or is about 3 weeks. In some embodiments, the interval between each administered dose is or is about 4 weeks.

[0525] In some embodiments, the dose, e.g., single dose or each individual dose of multiple doses (e.g., six or fewer multiple doses), is an amount between about 0.001 mg/kg and about 100 mg/kg, inclusive. In some embodiments, the dose, e.g., single dose or each individual dose of multiple doses (e.g., six or fewer multiple doses), is an amount between about 0.003 mg/kg and about 80 mg/kg, inclusive. In some embodiments, the dose, e.g., single dose or each individual dose of multiple doses (e.g., six or fewer multiple doses), is an amount between about 0.5 mg/kg and about 60 mg/kg, inclusive. In some embodiments, the dose, e.g., single dose or each individual dose of multiple doses (e.g., six or fewer multiple doses), is an amount between about 1 mg/kg and about 60 mg/kg, inclusive. In some embodiments, the dose, e.g., single dose or each individual dose of multiple doses (e.g., six or fewer multiple doses), is an amount between about 1 mg/kg and about 40 mg/kg, inclusive. In some embodiments, the dose, e.g., single dose or each individual dose of multiple doses (e.g., six or fewer multiple doses), is an amount between about 1 mg/kg and about 20 mg/kg, inclusive. In some embodiments, the dose, e.g., single dose or each individual dose of multiple doses (e.g., six or fewer multiple doses), is an amount between about 1 mg/kg and about 10 mg/kg, inclusive. In some embodiments, the dose, e.g., single dose or each individual dose of multiple doses (e.g., six or fewer multiple doses), is an amount between about 1 mg/kg and about 8 mg/kg, inclusive. In some embodiments, the dose, e.g., single dose or each individual dose of multiple doses (e.g., six or fewer multiple doses), is an amount between about 1 mg/kg and about 6 mg/kg, inclusive. In some embodiments, the dose, e.g., single dose or each individual dose of multiple doses (e.g., six or fewer multiple doses), is an amount between about 1 mg/kg and about 3 mg/kg, inclusive. In some embodiments, the dose, e.g., single dose or each individual dose of multiple doses (e.g., six or fewer multiple doses), is an amount of about 1 mg/kg, 3 mg/kg, or 10 mg/kg.

[0526] In some embodiments, when the dose is administered once weekly, such as QIW, the amount administered per dose is between about 1 mg/kg and about 3 mg/kg. In some embodiments, when the dose is administered once weekly, such as QIW, the amount administered per dose is or is about 1 mg/kg, 1.5 mg/kg, 2 mg/kg, 2.5 mg/kg, or 3 mg/kg, or any value in between any of the foregoing.

[0527] In some embodiments, when the dose is administered once every 3 weeks, such as Q3W, the amount administered per dose is between about 3 mg/kg and about 10 mg/kg. In some embodiments, when the dose is administered once every 3 weeks, such as Q3W, the amount administered per dose is or is about 3 mg/kg, 3.5 mg/kg, 4 mg/kg, 4.5 mg/kg, 5 mg/kg, 5.5 mg/kg, 6 mg/kg, 6.5 mg/kg, 7 mg/kg, 7.5 mg/kg, 8 mg/kg, 8.5 mg/kg, 9 mg/kg, 9.5 mg/kg, or 10 mg/kg, or any value between.

[0528] In some embodiments, a dose regimen as described herein is administered to achieve a therapeutically effective amount.

[0529] In some embodiments, the duration of administration, such as for administration of the multiple doses (e.g., six or fewer single doses), is for one week, two weeks, three weeks, one month, two months, three months, four months, five months, or six months. In some embodiments, the duration of administration, such as for administration of the multiple doses (e.g., six or fewer single doses), is for no more than two months, such as no more than six weeks.

[0530] In some embodiments, the therapeutically effective amount, such as administered as 2, 3, 4, 5 or 6 doses, is administered within a period of no more than 6 weeks, such as within a period of 1 week to 6 weeks. In some embodiments, the therapeutically effective amount is administered within a period of six weeks. In some embodiments, the therapeutically effective amount is administered within a period of five weeks. In some embodiments, the therapeutically effective amount is administered within a period of four weeks. In some embodiments, the therapeutically effective amount is administered within a period of three weeks. In some embodiments, the therapeutically effective amount is administered within a period of two weeks. In some embodiments, the therapeutically effective amount is administered within a period of one week.

[0531] It is contemplated that dosing (e.g., multiple doses), can continue until any time as desired by a skilled practitioner. For example, dosing may continue until a desirable disease response is achieved, such as a reduction in tumor size, a reduction or amelioration in signs and/or symptoms of a disease.

[0532] B. Combination Therapy

[0533] In some embodiments, the fusion proteins containing variant CD80 polypeptides or pharmaceutical compositions thereof can also be administered with one or more additional agents. In particular embodiments, the one or more additional agent is an agent that does not compete with or block the binding of the variant CD80 polypeptide to its cognate binding partner, such as to one or more of CD28, CTLA-4 and PD-L1. For example, in particular embodiments, the variant CD80 polypeptide of the fusion protein for use in methods provided herein binds to PD-L1, such as with increased affinity compared to the wild-type or unmodified CD80 polypeptide, and the additional agent does not bind to PD-L1 and/or does not compete for binding to PD-L1 or does not share the same or overlapping epitope of PD-L1 as the variant CD80 polypeptide.

[0534] In some embodiments, the combination therapy includes administering to a subject a therapeutically effective amount of the anti-cancer agent, such as any described herein. In some embodiments, a therapeutically effective dose can be from or from about 0.01 mg to 1000 mg, such as a dose of at least 0.01 mg, 0.1 mg, 1 mg, 10 mg, 1000 mg, 2000 mg, 3000 mg or more. In some embodiments, a therapeutically effective dose of the anti-cancer agent is from or from about 0.01 mg/kg to about 50 mg/kg, such as about 0.1 mg/kg to about 20 mg/kg, about 0.1 to about 10 mg/kg, about 0.3 to about 10 mg/kg, about 0.5 mg/kg to about 5 mg/kg or about 0.5 mg/kg to about 1 mg/kg.

[0535] In some embodiments, the dose of the anti-cancer agent (e.g. immune checkpoint inhibitor or chemotherapeutic agent) is continued or repeated in accord with its clinically dosing schedule. Thus, in some embodiments, in a dose schedule or cycle of administration in accord with the provided methods, the variant CD80 polypeptide (e.g. variant CD80-Fc fusion protein) can be administered only one time, such as in a single dose or infusion or in several doses as described, whereas the administration of the anticancer agent is continued or repeated more than one time, such as three times a week, two times a week, once a week, once every two weeks, once every three weeks or once a month during a dosing schedule or cycle of administration. In some embodiments, the dosing schedule or cycle of administration is or is about 28 days or 4 weeks.

[0536] In some embodiments, the anti-cancer agent is an immune checkpoint inhibitor. The immune checkpoint inhibitor can be administered in an amount that is from or from about 0.01 mg to 1000 mg, such as at a dose of at least 0.01 mg, 0.1 mg, 1 mg, 10 mg, 1000 mg, 2000 mg, 3000 mg or more. In an exemplary embodiment, an immune checkpoint inhibitor may be administered at about 0.3 mg/kg to 10 mg/kg, or the maximum tolerated dose, such as at least 0.5 mg/kg, or at least 1 mg/kg, or at least 2 mg/kg, or at least 3 mg/kg, or at least 5 mg/kg, or at least 8 mg/kg. In some cases, the dose can be administered as a single dose or in a plurality of doses. Alternatively, the immune checkpoint inhibitor may be administered by an escalating dosage regimen including administering a first dosage at about 3 mg/kg, a second dosage at about 5 mg/kg, and a third dosage at about 9 mg/kg. Alternatively, the escalating dosage regimen includes administering a first dosage of the immune checkpoint inhibitor at about 5 mg/kg and a second dosage at about 9 mg/kg. Another stepwise escalating dosage regimen may include administering a first dosage of an immune checkpoint inhibitor at about 3 mg/kg, a second dosage of about 3 mg/kg, a third dosage of about 5 mg/kg, a fourth dosage of about 5 mg/kg, and a fifth dosage of about 9 mg/kg. In another aspect, a stepwise escalating dosage regimen may include administering a first dosage of 5 mg/kg, a second dosage of 5 mg/kg, and a third dosage of 9 mg/kg. In some embodiments, particular dosages can be administered twice weekly, once weekly, once every two weeks, once every three weeks or once a month or more. In some cases, the dosages can be administered over a course of a cycle that can be repeated, such as repeated for one month, two months, three months, six months, 1 year or more.

[0537] In some embodiments, the additional agent is a checkpoint inhibitor that is able to block the interaction between PD-L1 and its receptor PD-1, thereby providing an alternative or approach for blocking or preventing the negative regulatory signaling that would have otherwise resulted from the PD-L1/PD-1 interaction.

[0538] In some embodiments, targeting blockade of such receptor/ligand interactions achieved by the provided combination therapy methods can produce additive or synergistic antitumor activities. Hence, in some aspects, the provided combination therapy improves the treatment outcome or response compared to treatment of the subject, or a group of similarly situated subjects, with either molecule alone as a monotherapy. In some aspects, the provided combination therapy achieves similar or greater anti-tumor efficacy at lower dosages of one or other molecules compared to treatment of the subject, or a group of similarly situated subjects, with either molecule alone as a monotherapy.

[0539] In some embodiments, the additional agent is a PD-1 inhibitor. PD-1 is an inhibitory receptor that is a type 1 membrane protein and is able to be bound by ligands such as PD-L1 and PD-L2, which are members of the B7 family. PD-1 includes human and non-human proteins. In particular, PD-1 antigen includes human PD-1 (see e.g., UniProt Accession No. Q15116.3). In some embodiments, a PD-1 inhibitor useful in the provided combinations described herein include any molecule capable of inhibiting, blocking, abrogating or interfering with the activity or expression of PD-1 In some aspects, a PD-1 inhibitor disrupts the interaction between PD-1 and one or both of its ligands PD-L1 and PD-L2.

[0540] In some embodiments, the PD-1 inhibitor is a small molecule, a nucleic acid, a protein or polypeptide, an antibody or antigen-binding fragment thereof, a peptibody, a diabody, or a minibody. In one instance the PD-1 inhibitor is a small molecule compound (e.g., a compound having a molecule weight of less than about 1000 Da.). Examples of small molecule inhibitor sof PD-1 (e.g. Sasikumar et al., Biodrugs (2018) 10.1007/s40259-018-0303-4). In other instances, useful PD-1 inhibitors in the combinations described herein include nucleic acids and polypeptides. A nonlimiting exemplary peptide that is a PD-1 inhibitor is AUR-012. A PD-1 inhibitor can be a polypeptide (e.g., macrocyclic polypeptide), such as those exemplified in U.S. Patent Application Publication No.: 2014/0294898, In other examples, a PD-1 inhibitor can include a recombinant fusion protein of an extracellular domain of a PD-1 ligand, such as an extracellular domain of PD-L1 or PD-L2. For example, AMP-224 (Amplimmune/GlaxoSmithKline) contains the extracellular domain of PD-L2 and an Fc region of human IgG, which can bind to PD-1 and block interactions with its ligands, se e.g, international patent application publication Nos. WO2010/027827 and WO2011/066342.

[0541] Exemplary inhibitors of PD-1 include, but are not limited to CS1003 (Cstone Pharmaceuticals), AK103 or AK105 (Akesio Biopharma, Hangzhou Hansi Biologics, Hanzhong Biologics), HLX-10 (Henlius Biotech). LZM009 (Livzon), JTX-4014.

[0542] In some embodiments, the PD-1 inhibitor is an anti-PD-1 antibody or antigen binding fragments thereof. In some aspects, anti-PD-1 antibody or antigen-binding fragments can exhibit one or more of the following characteristics: (a) binds to human PD-1 with a KD of 1×10⁻⁷ M or less, such as determined by surface plasmon resonance using a Biacore biosensor system; (b) does not substantially bind to human CD28, CTLA-4 or ICOS; (c) increases T-cell proliferation in a Mixed Lymphocyte Reaction (MLR) assay; (d) increases interferon-gamma production in an MLR assay; (e) increases IL-2 secretion in an MLR assay; (f) binds to human PD-1 and cynomolgus monkey PD-1; (g) inhibits the binding of PD-L1 and/or PD-L2 to PD-1; (h) stimulates antigen-specific memory responses; (i) stimulates antibody responses; and/or (j) inhibits tumor cell growth in vivo.

[0543] In some cases, the anti-PD-1 antibody is a chimeric antibody. In other cases, the anti-PD-1 antibody is a humanized antibody. In further cases, the anti-PD-1 antibody is a chimeric humanized antibody. The anti-PD-1 antibody can be a human antibody or humanized antibody. Examples of anti-PD-1 antibodies or antigen-binding fragments are known, see e.g. U.S. Pat. Nos. U.S. Pat. Nos. 6,808,710, 7,488,802, 7,943,743, 8,008,449, 8,168,757 and 8,354,509, 8,779, 105, 8,735, 553; U.S. Patent Application Publication US20050180969, US20070166281, US20170290808, international patent application publication Nos. WO2008156712 WO2012145493, WO2018156494, WO201891661, WO2014206107; Clinical Trial Study Record Nos.: NCT03474640; NCT03473743; NCT03311412; NCT02383212. In some embodiments, two or more PD-1 antibodies are administered in combination with a variant CD80 fusion protein as described herein.

[0544] Exemplary anti-PD-1 antibodies include, but are not limited to, AGEN-2034 (Agenus), AM-0001, AK 103 (Akeso Biopharma), BAT-I306 (Bio-Thera Solutions), BGB-A317 (Beigene), BI-754091, cemiplimab (REGN2810 or SAR439684) (Sanofi/Regeneron), CBT-501, ENUM-244C8, GB-226, GLS-010 (Gloria Pharmaceuticals; WuXi Biologics), GX-D1, IBI308 (Innovent Biologics), JS001 (Junshi Biosciences), JNJ-63723283, MGA012 (Macrogenics), MEDI0680 or AMP514 (AstraZeneca/MedImmune), nivolumab, pembrolizumab, pidilizumab (Pfizer), CT011 or MDV9300, PDR001 (Pfizer), recombinant humanized anti-PD-1 mAb (Bio-Thera Solutions), PD-1 based bispecific antibody (Beijing Hanmi Pharmaceutical), PD-1 monoclonal antibody (Genor Biopharma), REGN-2810, SHR-1210 (Hengrui Medicine), Sym021, SSI-361, TAB001, TSR-042 or an antigen binding fragment thereof.

[0545] In one embodiment, the anti-PD-1 Ab is nivolumab or a derivative thereof, such as variants or antigen-binding fragments of nivolumab. Nivolumab (also known as Opdivorm; formerly designated 5C4, BMS-936558, MDX-1106, or ONO-4538) is a fully human IgG4 (S228P) PD-1 immune checkpoint inhibitor antibody that selectively prevents interaction with PD-1 ligands (PD-L1 and PD-L2), thereby blocking the down-regulation of antitumor T-cell functions (see e,g, U.S. Pat. No. 8,008,449; Wang et al., 2014 Cancer Immunol Res. 2(9):846-56).

[0546] In another embodiment, the anti-PD-1 antibody is pembrolizumab or a derivative thereof, such as variants or antigen-binding fragments of pembrolizumab. Pembrolizumab (also known as Keytruda™, lambrolizumab, and MK-3475) is a humanized monoclonal IgG4 antibody directed against human cell surface receptor PD-1 (programmed death-1 or programmed cell death-1). Pembrolizumab is described, for example, in U.S. Pat. No. 8,900,587 and as antibody designated h409AII in International patent publication No. WO2008156712.

[0547] In a further embodiment, the anti-PD-1 antibody is pidilizumab (also called hBAT-1 or CT-011) or derivatives thereof, such as variants or antigen-binding fragments of pidilizumab. Pidilizumab is a humanized IgG1K monoclonal antibody that was generated from a murine antibody (BAT), which was raised against B lymphoid cell membranes, and has been shown to elicit T-celland NK-cell-based activities. Pidilizumab binds human PD-1 (see, e.g., antibody designated BAT-RK_{D}/RHC in US 2005/0180969).

[0548] In other embodiments, the anti-PD-1 Ab is MEDI0608 (formerly AMP-514), or is a derivative thereof, such as variants or antigen-binding fragment of MEDI1068. MEDI0608 is a monoclonal antibody against the PD-1 receptor. MEDI0608 is described, for example, in U.S. Pat. No. 8,609,089B2.

[0549] In some embodiments, the additional agent is a checkpoint inhibitor that is able to block the interaction between CTLA-4 and its cognate binding partners CD80 or CD86. Exemplary anti-CTLA-4 antibodies include ipilimumab (Bristol-Myers Squibb) and tremelimumab (Pfizer).

[0550] In some embodiments, the anti-CTLA-4 Ab is ipilimumab (also called MDX-010, MDX-101, MDX-CTLA-4, 10D1 or Yervoy®), or is a derivative thereof, such as variants or antigen-binding fragments of ipilimumab. Ipilimumab is a fully humanized IgG1 monoclonal antibody against CTLA-4. Ipilimumab is described, for example, in International published PCT Appl. No. WO2001014424 or EP patent EP1503794, U.S. published patent appl. Nos. U.S. Pat. App. Pub. No. US20020086014, US20150283234.

[0551] In some embodiments, the anti-CTLA-4 Ab is tremelimumab (also called CP-675, CP-675206, ticilimumab, antibody clone 11.2.1), or is a derivative thereof, such as a variant or antigen-binding fragment of tremelimumab. Tremelimumab is a monoclonal antibody against CTLA-4. Tremelimumab is described, for example, in U.S. Pat. Nos. 6,682,736, 7,109,003; 7,123,281; 7,411,057; 7,824,679; 8,143,379; 7,807,797; and 8,491,895.

[0552] Checkpoint inhibitors, such as anti-PD-1 antibodies, for use in the combination therapy described herein include antigen-binding fragment of an antibody, e.g. anti-PD-1 antibody, such as any of the above antibodies. Examples of antigen-binding fragments include, for example, a Fab fragment, which is a monovalent fragment containing the VL, VH, CL and CHI domains; (ii) a F(ab′)2 fragment, which is a bivalent fragment comprising two Fab fragments linked by a disulfide bridge at the hinge region; (iii) a Fd fragment containing the VH and CHI domains; and (iv) a Fv fragment containing the VL and VH domains of a single arm of an antibody.

[0553] In some embodiments, the anti-cancer agent is a chemotherapeutic agent. In some embodiments, the anti-cancer agent is an alkylating agent. Alkylating agents are compounds that directly damage DNA by forming covalent bonds with nucleic acids and inhibiting DNA synthesis. Exemplary alkylating agents include, but are not limited to, mechlorethamine, cyclophosphamide, ifosamide, melphalan, chlorambucil, busulfan, and thiotepa as well as nitrosurea alkylating agents such as carmustine and lomustine. In some embodiments, the anti-cancer agent is a platinum drug. Platinum drugs bind to and cause crosslinking of DNA, which ultimately triggers apoptosis. Exemplary platinum drugs include, but are not limited to, cisplatin, carboplatin, oxaliplatin, satraplatin, picoplatin, nedaplatin, triplatin, and lipoplatin. In some embodiments, the anti-cancer agent is an antimetabolite. Antimetabolites interfere with DNA and RNA growth by substituting for the normal building blocks of RNA and DNA. These agents damage cells during the S phase, when the cell's chromosomes are being copied. In some cases, antimetabolites can be used to treat leukemias, cancers of the breast, ovary, and the intestinal tract, as well as other types of cancer. Exemplary antimetabolites include, but are not limited to, 5-fluorouracil (5-FU), 6-mercaptopurine (6-MP), capecitabine (Xeloda®), cytarabine (Ara-C®), floxuridine, fludarabine, gemcitabine (Gemzar®), hydroxyurea, methotrexate, and pemetrexed (Alimta®). In some embodiments, the anti-cancer agent is an anti-tumor antibiotic. Anti-tumor antibiotics work by altering the DNA inside cancer cells to keep them from growing and multiplying. Anthracyclines are anti-tumor antibiotics that interfere with enzymes involved in DNA replication. These drugs generally work in all phases of the cell cycle. They can be widely used for a variety of cancers. Exemplary anthracyclines include, but are not limited to, daunorubicin, doxorubicin, epirubicin, and idarubicin. Other anti-tumor antibiotics include actinomycin-D, bleomycin, mitomycin-C, and mitoxantrone. In some embodiments, the anti-cancer agent is a topoisomerase inhibitor. These drugs interfere with enzymes called topoisomerases, which help separate the strands of DNA so they can be copied during the S phase. Topoisomerase inhibitors can be used to treat certain leukemias, as well as lung, ovarian, gastrointestinal, and other cancers. Exemplary toposiomerase inhibitors include, but are not limited to, doxorubicin, topotecan, irinotecan (CPT-11), etoposide (VP-16), teniposide, and mitoxantrone. In some embodiments, the anti-cancer agent is a mitotic inhibitor. Mitotic inhibitors are often plant alkaloids and other compounds derived from natural plant products. They work by stopping mitosis in the M phase of the cell cycle but, in some cases, can damage cells in all phases by keeping enzymes from making proteins needed for cell reproduction. Exemplary mitotic inhibitors include, but are not limited to, paclitaxel (Taxol®), docetaxel (Taxotere®), ixabepilone (Ixempra®), vinblastine (Velban®), vincristine (Oncovin®), vinorelbine (Navelbine®), and estramustine (Emcyt®). In some embodiments, the anti-cancer agent is a platinum-based chemotherapeutic agent, such as oxaliplatin. Oxaliplatin is a platinum-based drug that acts as a DNA cross-linking agent to effectively inhibit DNA replication and transcription, resulting in cytotoxicity which is cell cycle non-specific.

[0554] In some embodiments, a chemotherapeutic agent, such as a platinum-based agent, e.g. oxaliplatin, is administered to a human patient in an amount that can range from about 20 mg/m² to about 150 mg/m2, for example, from about 40 mg/m² to about 100 mg/m², or an amount of at or about 50 mg/m², at or about 55 mg/m2, at or about 60 mg/m², at or about 65 mg/m², at or about 70 mg/m², at or about 75 mg/m², at or about 80 mg/m², at or about 85 mg/m², at or about 90 mg/m², or at or about 95 mg/m², or any value between any of the foregoing. In some embodiments, particular dosages can be administered twice weekly, once weekly, once every two weeks, once every three weeks or once a month or more. In some cases, the dosages can be administered over a course of a cycle that can be repeated, such as repeated for one month, two months, three months, six months, 1 year or more.

[0555] The anticancer agent, such as a checkpoint inhibitor (e.g. PD-1 inhibitor, such as an anti-PD-1 antibody or antigen-binding fragment thereof) can be administered prior to, simultaneously with or near simultaneously with, sequentially with or intermittently with the fusion proteins containing variant CD80 polypeptides or pharmaceutical compositions thereof. For example, the anticancer agent, such as a checkpoint inhibitor (e.g. PD-1 inhibitor, e.g. anti-PD-1 antibody), and the fusion protein containing variant CD80 polypeptide (e.g., variant CD80-Fc, such as variant CD80 IgV-Fc) can be co-administered together or separately. In some aspects, the fusion protein containing the variant CD80 polypeptide is administered prior to the anticancer agent, such as checkpoint inhibitor (e.g. PD-1 inhibitor). In some embodiments, the anticancer agent, such as checkpoint inhibitor (e.g. PD-1 inhibitor) is administered within 2 hours to one week after the initiation of administration of the variant CD80 fusion protein or after the administration of the last dose of a therapeutically effective amount of the variant CD80 fusion protein. In some aspects, the anticancer agent, such as checkpoint inhibitor (e.g. PD-1 inhibitor) is administered between or between about 2 hours and 144 hours after the initiation of administration of the variant CD80 fusion protein or after administration of the last dose of a therapeutically effective amount of the variant CD80 fusion protein, such as between or between about 2 hours and 120 hours, between or between about 2 hours and 96 hours, between or between about 2 hours and 72 hours, between or between about 2 hours and 48 hours, between or between about 2 hours and 24 hours, between or between about 2 hours and 12 hours, between or between about 12 hours and 120 hours, between or between about 12 hours and 96 hours, between or between about 12 hours and 72 hours, between or between about 12 hours and 48 hours, between or between about 12 hours and 24 hours, between or between about 24 hours and 120 hours, between or between about 24 hours and 96 hours, between or between about 24 hours and 72 hours, between or between about 24 hours and 48 hours, between or between about 48 hours and 120 hours, between or between about 48 hours and 96 hours, between or between about 48 hours and 72 hours, between or between about 72 hours and 120 hours, between or between about 72 hours and 96 hours or between or between about 96 hours and 120 hours.

[0556] The anticancer agent, such as checkpoint inhibitor (e.g. PD-1 inhibitor, such as anti-PD-1 antibody), can be administered as needed to subjects. Determination of the frequency of administration can be made by persons skilled in the art, such as an attending physician based on considerations of the condition being treated, age of the subject being treated, severity of the condition being treated, general state of health of the subject being treated and the like. In some embodiments, an effective dose of a anticancer agent, such as checkpoint inhibitor (e.g. PD-1 inhibitor, e.g. anti-PD-1 antibody), is administered to a subject one or more times. In some embodiments, an effective dose of a anticancer agent, such as checkpoint inhibitor (e.g. PD-1 inhibitor, such as an anti-PD-1 antibody), is administered to the subject once a month, less than once a month, such as, for example, every two months or every three months. In some embodiments, an effective dose of a anticancer agent, such as checkpoint inhibitor (e.g. PD-1 inhibitor, such as an anti-PD-1 antibody), is administered less than once a month, such as, for example, once every three weeks, once every two weeks, or once every week. In some cases, an effective dose of a anticancer agent, such as checkpoint inhibitor (e.g. PD-1 inhibitor, such as an anti-PD-1 antibody), is administered to the subject at least once. In some embodiments, the effective dose of a anticancer agent, such as checkpoint inhibitor (e.g. PD-1 inhibitor, e.g. an anti-PD-1 antibody), may be administered multiple times, including for periods of at least a month, at least six months, or at least a year.

[0557] In some embodiments, pharmaceutical compositions of a anticancer agent, such as checkpoint inhibitor (e.g. PD-1 inhibitor, such as an anti-PD-1 antibody), are administered in the provided combination therapy in an amount effective for treatment of (including prophylaxis of) cancer. The therapeutically effective amount is typically dependent on the weight of the subject being treated, his or her physical or health condition, the extensiveness of the condition to be treated, or the age of the subject being treated. In general, a anticancer agent, such as checkpoint inhibitor (e.g. PD-1 inhibitor, such as an anti-PD-1 antibody), may be administered in an amount in the range of about 10 μg/kg body weight to about 100 mg/kg body weight per dose. In some embodiments, the anticancer agent, such as checkpoint inhibitor (e.g. PD-1 inhibitor, such as an anti-PD-1 antibody), may be administered in an amount in the range of about 50 μg/kg body weight to about 5 mg/kg body weight per dose. In some embodiments, a anticancer agent, such as checkpoint inhibitor (e.g. PD-1 inhibitor, such as an anti-PD-1 antibody), may be administered in an amount in the range of about 100 μg/kg body weight to about 10 mg/kg body weight per dose. In some embodiments, a anticancer agent, such as checkpoint inhibitor (e.g. PD-1 inhibitor, such as an anti-PD-1 antibody), may be administered in an amount in the range of about 100 μ/kg body weight to about 20 mg/kg body weight per dose. In some embodiments, a anticancer agent, such as checkpoint inhibitor (e.g. PD-1 inhibitor, such as an anti-PD-1 antibody), may be administered in an amount in the range of about 0.5 mg/kg body weight to about 20 mg/kg body weight per dose.C.

[0558] C. Subjects for Treatment

[0559] In some embodiments, the provided methods are for treating a subject that is or is suspected of having the disease or condition for which the therapeutic application is directed. In some cases, the subject for treatment can be selected prior to treatment based on one or more features or parameters, such as to determine suitability for the therapy or to identify or select subjects for treatment in accord with any of the provided embodiments, including treatment with any of the provided variant CD80 polypeptides or variant CD80 IgSF domain fusion proteins.

[0560] In some embodiments, provided methods include diagnostic, prognostic or monitoring methods utilizing binding assays on various biological samples of patients having a disease or condition in which is known, suspected or that may be a candidate for treatment in accord with the provided embodiments. In some embodiments, the methods are carried out with reagents capable of detecting one or more cells surface marker expressed, or likely to be expressed, on tumors or tumor cell infiltrates. In some aspects, the one or more cell markers include those in which tumors or tumor cell infiltrates express one or more binding partner (e.g. CD28, PD-L1 and/or CTLA-4) or competing cell surface ligand (e.g. CD80 or CD86) of the variant CD80 polypeptide to be utilized in the therapeutic methods. In some aspects, a reagent is employed that is able to detect a cell surface marker of T cells, such as tumor infiltrating T lymphocytes, e.g. a CD3 binding reagent. Such reagents can be used as companion diagnostics for selecting subjects that are most likely to benefit from treatment with the provided molecules or pharmaceutical compositions and/or for predicting efficacy of the treatment.

[0561] In some embodiments, methods are provided for selecting subjects and/or predicting efficacy of treatment with provided therapies based on activity of provided variant CD80 polypeptides or variant CD80 IgSF domain fusion proteins to antagonize or block CTLA-4, antagonize or block PD-L1/PD-1 interaction and/or to mediate CD28 agonism, such as PD-L1-dependent CD28 costimulation, including in methods for increasing an immune response for treating a disease or condition and/or for treating a tumor or cancer.

[0562] In some embodiments, the reagent is binding reagent that specifically binds to the cell surface marker (e.g. CD28, CD80 (B7-1), CD86 (B7-2) PD-L1, or CTLA-4) on the surface of a cell. In some embodiments, the binding reagent can be an antibody or antigen-binding fragment, protein ligand or binding partner, an aptamer, an affimer, a peptide or a hapten. In some embodiments, such reagents can be used as a companion diagnostic for selecting or identifying subjects for treatment with a therapeutic agent or pharmaceutical composition provided herein containing a variant CD80 polypeptide that is or contains an IgSF domain. Included among such therapeutic agents are fusion proteins containing an extracellular portion of a CD80 variant polypeptide containing an affinity modified IgSF domain (e.g. IgV) is linked, directly or indirectly, to a multimerization domain, e.g. an Fc domain or region. In some embodiments, such a therapeutic agent is a variant CD80-Fc fusion protein.

[0563] In some embodiments, prior to administering a provided pharmaceutical composition (including pharmaceutical composition comprising the variant CD80 IgSF domain fusion proteins) to a subject, such as a subject known or suspected of having a cancer, the method includes obtaining a biological sample from the subject for assessment of the presence or absence, or degree of presence, of a cell surface marker as described. In some embodiments, the provided methods including contacting a biological sample from a subject with a binding reagent (e.g. antibody) capable of specifically binding to the ectodomain of the cell surface marker (e.g. CD28, CD80 (B7-1), CD86 (B7-2, PD-L1, or CTLA-4) and detecting the presence or absence of the bound binding reagent in or on cells of the biological sample. In some embodiments, the biological sample is a tumor tissue sample comprising stromal cells, tumor cells or tumor infiltrating cells, such as tumor infiltrating immune cells, e.g. tumor infiltrating lymphocytes.

[0564] In some embodiments, it is desired to detect, in a subject suspected of having a cancer, cells that are surface negative for a cell surface marker that is, is likely or may be a competing cell surface ligand to the variant CD80 polypeptide. In some aspects, a competing cell surface ligand is a ligand that, if expressed on cells in or around the tumor, may or has the potential to compete for binding of the variant CD80 polypeptide to one or more of its binding partners, such as CD28. For example, CD80 and CD86 are cell surface markers that are expressed or may be expressed on antigen presenting cells (APCs) or on tumor cells and are cognate binding partners for CD28. In some embodiments, the provided methods are carried out with reagents that are capable of binding to CD80 or CD86. In some embodiments of the provided methods, a biological sample is detected as having cells surface negative for CD80 or CD86, or cells that are relatively surface negative for CD80 or CD86, if there is not detectectable expression of CD80 or CD86 (e.g. following contacting with the binding reagent and detection of bound binding reagent) on cells of the biological sample and/or in which CD80 or CD86 is expressed on less than or less than about 20% of cells of the biological sample and/or in which CD80 or CD86 surface expression on cells of the biological sample is scored or identified as having a low intensity of cell membrane staining (e.g. score of 0 or 1). In some embodiments of the provided methods, a biological sample is detected as having cells that are relatively surface negative for CD80 or CD86 if less than or less than about 20% of the cells of the biological sample are surface positive for CD80 or CD86, such as less than or less than about 10% of the cells, less than or less than about 5% of the cells, less than or less than about 2% of the cells or less than or less than about 1% of the cells. In some embodiments, if the biological sample is determined or assessed to comprise cells that are surface negative for expression of CD80 or CD86, or relatively surface negative for expression of CD80 or CD86, the subject is selected for treatment.

[0565] In some embodiments, the binding reagent is an antibody or an antigen binding fragment thereof that specifically binds CD80 (B7-1) or CD86 (B7-2). Various reagents, including antibodies, specific for CD80 or CD86, including human CD80 or human CD86, are known. Exemplary antibodies for use in diagnostics tests or as part of a kit for diagnostics is provided in Table 4.

TABLE 4
Exemplary Antibodies for Use in Diagnostics Tests

| Antibody | IgG Isotype | Supplier (Catalogue Number) |
|---|---|---|
| Anti-CD80 | Rabbit IgG | Abcam (ab134120) |
| [EPR1157(2)] | (monoclonal) | |
| Anti-CD80 [2D10] | Mouse IgG1k | BioLegend (305202) |
| Anti-CD80 [775] | Rabbit IgG | Sino Biologicals |
| | (monoclonal) | (10698-R775) |
| Anti-CD86 [BU63] | Mouse IgG1k | Abcam (ab234000) |
| Anti-CD86 [CDLA86] | Mouse IgG1k | Source Bioscience |
| | | (LS-C392134) |
| Anti-CD86 [118] | Rabbit IgG | Sino Biologicals |
| | (monoclonal) | (10699-R118) |
| Anti-CD86 [C86/2160R] | Rabbit IgG | Abcam (ab234401) |
| | (monoclonal) | |

[0566] In some embodiments, the provided methods include contacting a biological sample from a subject with an anti-CD80 antibody EPR1157(2) and detecting the presence or absence of the bound binding reagent in or on cells of the biological sample. In some embodiments, the provided methods include contacting a biological sample from a subject with an anti-CD80 antibody 2D10 and detecting the presence or absence of the bound binding reagent in or on cells of the biological sample. In some embodiments, the provided methods include contacting a biological sample from a subject with an anti-CD80 antibody 775 and detecting the presence or absence of the bound binding reagent in or on cells of the biological sample. In some embodiments, the provided methods include contacting a biological sample from a subject with an anti-CD86 antibody BU63 and detecting the presence or absence of the bound binding reagent in or on cells of the biological sample. In some embodiments, the provided methods include contacting a biological sample from a subject with an anti-CD86 antibody CDLA86 and detecting the presence or absence of the bound binding reagent in or on cells of the biological sample. In some embodiments, the provided methods include contacting a biological sample from a subject with an anti-CD86 antibody 118 and detecting the presence or absence of the bound binding reagent in or on cells of the biological sample. In some embodiments, the provided methods include contacting a biological sample from a subject with an anti-CD86 antibody C86/2160R and detecting the presence or absence of the bound binding reagent in or on cells of the biological sample. In some embodiments, the biological sample is a tumor tissue sample comprising stromal cells, tumor cells or tumor infiltrating cells, such as tumor infiltrating immune cells, e.g. tumor infiltrating lymphocytes.

[0567] In some embodiments, it is desired to detect, in a subject suspected of having a cancer, cells that are surface positive for a cell surface marker that is or comprises a binding partner of a variant CD80 polypeptide. In some aspects, the binding partner is cell surface CD28, PD-L1 or CTLA-4, which, in some cases, can be expressed on tumor infiltrating T cells, antigen presenting cells or tumor cells. In some embodiments, a biological sample is detected for cells surface positive for a cell surface marker, e.g. CD28, PD-L1, or CTLA-4, if there is a detectable expression level of the binding partner (e.g. following contacting with the binding reagent and detection of bound binding reagent) in at least or at least about or about 1% of the cells, at least or at least about or about 5% of the cells, at least or at least about or about 10% of the cells, at least or at least about or about 20% of the cells, at least or at least about or about 40% of the cells or more.

[0568] In some embodiments, the tumor tissue sample is detected for cells surface positive for PD-L1 if there is a detectable expression level of the binding partner (e.g. following contacting with the binding reagent and detection of bound binding reagent) in at least or at least about or about 1% of the cells, at least or at least about or about 5% of the cells, at least or at least about or about 10% of the cells, at least or at least about or about 20% of the cells, at least or at least about or about 40% of the cells or more. In some embodiments, the cells are tumor cells or tumor infiltrating immune cells. In some embodiments, the tumor tissue sample is detected for cells surface positive for CD28 if there is a detectable expression level of the binding partner (e.g. following contacting with the binding reagent and detection of bound binding reagent) in at least or at least about or about 1% of the cells, at least or at least about or about 5% of the cells, at least or at least about or about 10% of the cells, at least or at least about or about 20% of the cells, at least or at least about or about 40% of the cells or more. In some embodiments, the cells are tumor infiltrating immune lymphocytes. In some embodiments, if the biological sample is determined or assessed to comprise cells that are surface positive for expression of PD-L1, or relatively surface positive for expression of PD-L1, the subject is selected for treatment.

[0569] In some embodiments, the reagent is a PD-L1-binding reagent that specifically binds to PD-L1 on the surface of a cell, such as on the surface of a tumor cell or myeloid cells present in the tumor environment. In some embodiments, the binding reagent is an antibody or an antigen binding fragment thereof that specifically binds PD-L1. Various companion diagnostic reagents for detecting PD-L1, such as human PD-L1, including intracellular or extracellular PD-L1, are known, e.g. Roach et al. (2016) Appl. Immunohistochem., Mol. Morphol., 24:392-397; Cogswell et al. (2017) Mol. Diagn. Ther. 21:85-93; International published patent application No. WO2015/181343 or WO2017/085307, or U.S. published patent application No. US2016/0009805 or US2017/0285037. Non limiting examples of anti-PD-L1 antibodies include, but are not limited to, mouse anti-PD-L1 clone 22C3 (Merck & Co.), rabbit anti-PD-L1 clone 28-8 (Bristol-Myers Squibb), rabbit anti-PD-L1 clones SP263 or SP142 (Spring Biosciences) and rabbit anti-PD-L1 antibody clone E1L3N. Such binding reagents can be used in histochemistry methods, including those available as Dako PD-L1 IHC 22C3 pharmDx assay, PD-L1 IHC 28-8 pharmDx assay, Ventana PD-L1 (SP263) assay, or Ventana PD-L1 (SP142) assay.

[0570] In some embodiments, the tumor tissue sample is detected for cells surface positive for CD28 if there is a detectable expression level of the binding partner (e.g. following contacting with the binding reagent and detection of bound binding reagent) in at least or at least about or about 1% of the cells, at least or at least about or about 5% of the cells, at least or at least about or about 10% of the cells, at least or at least about or about 20% of the cells, at least or at least about or about 40% of the cells or more. In some embodiments, the cells are tumor infiltrating immune cells, such as tumor infiltrating T lymphocytes. In some embodiments, if the biological sample is determined or assessed to comprise cells that are surface positive for expression of CD28, or relatively surface positive for expression of CD28, the subject is selected for treatment. In some embodiments, the binding reagent is an antibody or an antigen-binding fragment thereof that specifically binds CD28. Various reagents, including antibodies, specific for CD28, including human CD28, are known. Non-limiting examples of anti-CD28 antibodies include, but are not limited to, anti-CD28 antibody 007 (Sino Biologicals, 11524-R007) or anti-CD28 antibody C28/77 (NovusBio, NBO2-32817).

[0571] In some embodiments, the tumor tissue sample is detected for cells surface positive for CTLA-4 if there is a detectable expression level of the binding partner (e.g. following contacting with the binding reagent and detection of bound binding reagent) in at least or at least about or about 1% of the cells, at least or at least about or about 5% of the cells, at least or at least about or about 10% of the cells, at least or at least about or about 20% of the cells, at least or at least about or about 40% of the cells or more. In some embodiments, the cells are tumor infiltrating immune cells, such as tumor infiltrating T lymphocytes. In some embodiments, if the biological sample is determined or assessed to comprise cells that are surface positive for expression of CTLA-4, or relatively surface positive for expression of CTLA-4, the subject is selected for treatment. In some embodiments, the binding reagent is an antibody or an antigen-binding fragment thereof that specifically binds CTLA-4. Various reagents, including antibodies, specific for CTLA-4, including human CTLA-4, are known.

[0572] In some embodiments, the methods further can include methods for scoring the immune response in a subject with a cancer or suspected of having a cancer, such as using Immunoscore or similar methods for assessing immune cell infiltrates. In some aspects, such methods include methods for identifying or evaluating specific lymphocyte populations, such as T cells. For example, an immunoscore includes a quantifiable measure of a tumor-infiltrating lymphocytes. In some cases, the methods involve the use of a binding reagent that is capable of binding to CD3, which is generally a universal marker for T cells. In some aspects, further analysis may be done to identify the type of T cells, e.g. regulatory or cytototic T cells, such as based on CD45RO, CD8 or other marker of a T cell subset or type. In some cases, an immunoscore is based on the density of two lymphocyte populations, cytotoxic (CD8) and memory (CD45RO) T cells. Other immunoscore-like markers can be employed. In some cases, aspects of scoring or assessing an immune response, such as by analyzing the presence or absence of T lymphocytes, can be carried out using multiplex methods. Exemplary methods for analyzing or assessing an immune response in a subject, such as for analyzing the presence or absence of certain T lymphocyte populations in a biological sample in a subject are known, see e.g. Galon et al. (2012) Journal of Translational Medicine, 10:1; Galon et al. (2006) Science, 313:1960-1964; Galon et al. (2016) Journal of Translational Medicine, 14:273; Ascierto et al. (2013) Journal of Translational Medicine, 11:54; Kwak et al. (2016) Oncotarget, 7:81778-81790; U.S. patent application publication US20160363593. Further, any of the provided methods described herein for assessing or detecting a surface marker as described can be multiplexed together, including in methods for also assessing or scoring for the presence or absence of an immune response or presence of absence of T lymphocytes.

[0573] The binding reagent can be conjugated, such as fused, directly or indirectly to a detectable label for detection. In some cases, the binding reagent is linked or attached to a moiety that permits either direct detection or detection via secondary agents, such as via antibodies that bind to the reagent or a portion of the reagent and that are coupled to a detectable label. Exemplary detectable labels include, for example, chemiluminescent moieties, bioluminescent moieties, fluorescent moieties, radionuclides, and metals. Methods for detecting labels are well known in the art. Such a label can be detected, for example, by visual inspection, by fluorescence spectroscopy, by reflectance measurement, by flow cytometry, by X-rays, by a variety of magnetic resonance methods such as magnetic resonance imaging (MRI) and magnetic resonance spectroscopy (MRS). Methods of detection also include any of a variety of tomographic methods including computed tomography (CT), computed axial tomography (CAT), electron beam computed tomography (EBCT), high resolution computed tomography (HRCT), hypocycloidal tomography, positron emission tomography (PET), single-photon emission computed tomography (SPECT), spiral computed tomography, and ultrasonic tomography. Exemplary detectable labels include, for example, chemiluminescent moieties, bioluminescent moieties, fluorescent moieties, radionuclides, and metals. Among detectable labels are fluorescent probes or detectable enzymes, e.g. horseradish perioxidase.

[0574] The binding reagents can detect the cell surface marker, e.g. CD28, CD80 (B7-1), CD86 (B7-2) PD-L1, or CTLA-4, using any binding assay known to one of skill in the art including, in vitro or in vivo assays. Exemplary binding assays that can be used to assess, evaluate, determine, quantify and/or otherwise specifically detect expression or levels of a cell surface marker in a sample include, but are not limited to, solid phase binding assays (e.g. enzyme linked immunosorbent assay (ELISA)), radioimmunoassay (RIA), immunoradiometric assay, fluorescence assay, chemiluminescent assay, bioluminescent assay, western blot and histochemistry methods, such as immunohistochemistry (IHC) or pseudo immunohistochemistry using a non-antibody binding agent. In solid phase binding assay methods, such as ELISA methods, for example, the assay can be a sandwich format or a competitive inhibition format. In other examples, in vivo imaging methods can be used. The binding assay can be performed on samples obtained from a patient body fluid, cell or tissue sample of any type, including from plasma, urine, tumor or suspected tumor tissues (including fresh, frozen, and fixed or paraffin embedded tissue), lymph node or bone marrow. In exemplary methods to select a subject for treatment in accord with the therapeutic methods provided herein, harvesting of the sample, e.g. tumor tissue, is carried out prior to treatment of the subject.

[0575] In some embodiments, the binding assay is a tissue staining assay to detect the expression or levels of a binding partner in a tissue or cell sample. Tissue staining methods include, but are not limited to, cytochemical or histochemical methods, such as immunohistochemistry (IHC) or histochemistry using a non-antibody binding agent (e.g. pseudo immunohistochemistry). Such histochemical methods permit quantitative or semi-quantitative detection of the amount of the binding partner in a sample, such as a tumor tissue sample. In such methods, a tissue sample can be contacted with a binding reagent, and in particular one that is detectably labeled or capable of detection, under conditions that permit binding to a tissue- or cell-associated cell surface marker as described.

[0576] A sample for use in the methods provided herein as determined by histochemistry can be any biological sample that is associated with the disease or condition, such as a tissue or cellular sample. For example, a tissue sample can be solid tissue, including a fresh, frozen and/or preserved organ or tissue sample or biopsy or aspirate, or cells. In some examples, the tissue sample is tissue or cells obtained from a solid tumor, such as primary and metastatic tumors, including but not limited to, breast, colon, rectum, lung, stomach, ovary, cervix, uterus, testes, bladder, prostate, thyroid and lung cancer tumors. In particular examples, the sample is a tissue sample from a cancer that is a late-stage cancer, a metastatic cancer, undifferentiated cancer, ovarian cancer, in situ carcinoma (ISC), squamous cell carcinoma (SCC), prostate cancer, pancreatic cancer, non-small cell lung cancer, breast cancer, colon cancer.

[0577] In some aspects, when the tumor is a solid tumor, isolation of tumor cells can be achieved by surgical biopsy. Biopsy techniques that can be used to harvest tumor cells from a subject include, but are not limited to, needle biopsy, CT-guided needle biopsy, aspiration biopsy, endoscopic biopsy, bronchoscopic biopsy, bronchial lavage, incisional biopsy, excisional biopsy, punch biopsy, shave biopsy, skin biopsy, bone marrow biopsy, and the Loop Electrosurgical Excision Procedure (LEEP). Typically, a non-necrotic, sterile biopsy or specimen is obtained that is greater than 100 mg, but which can be smaller, such as less than 100 mg, 50 mg or less, 10 mg or less or 5 mg or less; or larger, such as more than 100 mg, 200 mg or more, or 500 mg or more, 1 gm or more, 2 gm or more, 3 gm or more, 4 gm or more or 5 gm or more. The sample size to be extracted for the assay can depend on a number of factors including, but not limited to, the number of assays to be performed, the health of the tissue sample, the type of cancer, and the condition of the subject. The tumor tissue is placed in a sterile vessel, such as a sterile tube or culture plate, and can be optionally immersed in an appropriate medium.

[0578] In some embodiments, tissue obtained from the patient after biopsy is fixed, such as by formalin (formaldehyde) or glutaraldehyde, for example, or by alcohol immersion. For histochemical methods, the tumor sample can be processed using known techniques, such as dehydration and embedding the tumor tissue in a paraffin wax or other solid supports known to those of skill in the art (see Plenat et ah, (2001) Ann Pathol. January 21(1):29-47), slicing the tissue into sections suitable for staining, and processing the sections for staining according to the histochemical staining method selected, including removal of solid supports for embedding by organic solvents, for example, and rehydration of preserved tissue.

[0579] In some embodiments, histochemistry methods are employed. In some cases, the binding reagent is directly attached or linked to a detectable label or other moiety for direct or indirect detection. Exemplary detectable regents including, but are not limited to, biotin, a fluorescent protein, bioluminescent protein or enzyme. In other examples, the binding reagents are conjugated, e.g. fused, to peptides or proteins that can be detected via a labeled binding partner or antibody. In some examples, a binding partner can be detected by HC methods using a labeled secondary reagent, such as labeled antibodies, that recognize one or more regions, e.g. epitopes, of the binding reagent.

[0580] In some embodiments, the resulting stained specimens, such as obtained by histochemistry methods, are each imaged using a system for viewing the detectable signal and acquiring an image, such as a digital image of the staining. Methods for image acquisition are well known to one of skill in the art. For example, once the sample has been stained, any optical or non-optical imaging device can be used to detect the stain or biomarker label, such as, for example, upright or inverted optical microscopes, scanning confocal microscopes, cameras, scanning or tunneling electron microscopes, canning probe microscopes and imaging infrared detectors. In some examples, the image can be captured digitally. The obtained images can then be used for quantitatively or semi-quantitatively determining the amount of the cell surface marker, e.g. e.g. CD28, CD80 (B7-1), CD86 (B7-2) PD-L1, or CTLA-4, in the sample. Various automated sample processing, scanning and analysis systems suitable for use with immunohistochemistry are available in the art. Such systems can include automated staining and microscopic scanning, computerized image analysis, serial section comparison (to control for variation in the orientation and size of a sample), digital report generation, and archiving and tracking of samples (such as slides on which tissue sections are placed). Cellular imaging systems are commercially available that combine conventional light microscopes with digital image processing systems to perform quantitative analysis on cells and tissues, including immunostained samples. See, e.g., the CAS-200 system (Becton, Dickinson & Co.). In particular, detection can be made manually or by image processing techniques involving computer processors and software. Using such software, for example, the images can be configured, calibrated, standardized and/or validated based on factors including, for example, stain quality or stain intensity, using procedures known to one of skill in the art (see e.g. published U.S. patent Appl. No. US20100136549).

[0581] In some embodiments, the diagnostic tests are used prior to, during, and/or after treatment containing the provided variant CD80 polypeptides. In some embodiments, the provided diagnostic tests predict the likelihood and/or degree of a subject having a response to a treatment containing the provided variant CD80 polypeptides. Also provided are methods for selecting a therapy for a subject with a disease or condition that is a tumor or cancer.

### V. KITS AND ARTICLES OF MANUFACTURE

[0582] Also provided herein are articles of manufacture that comprise the pharmaceutical compositions described herein (including pharmaceutical composition comprising the variant CD80 IgSF domain fusion proteins) in suitable packaging. Among suitable packaging for articles of manufacture include one or more containers, typically a plurality of containers, packaging material, and a label or package insert on or associated with the container or containers and/or packaging, generally including instructions for administration of the composition to a subject. Suitable containers for packaging for compositions described herein are known in the art, and include, for example, vials (such as sealed vials), vessels, ampules, bottles, jars, flexible packaging (e.g., sealed Mylar or plastic bags), and the like. These articles of manufacture may further be sterilized and/or sealed.

[0583] The article of manufacture may further include a package insert or label with one or more pieces of identifying information and/or instructions for use. In some embodiments, the information or instructions indicates that the contents can or should be used to treat a particular condition or disease, and/or providing instructions therefor. The label or package insert may indicate that the contents of the article of manufacture are to be used for treating the disease or condition. In some embodiments, the label or package insert provides instructions to treat a subject, e.g., according to any of the embodiments of the provided methods. In some embodiments, the instructions specify administering one or more of the unit doses to the subject.

[0584] Further provided are kits comprising the pharmaceutical compositions (or articles of manufacture) described herein, which may further comprise instruction(s) on methods of using the composition, such as uses described herein. The kits described herein may also include other materials desirable from a commercial and user standpoint, including other buffers, diluents, filters, needles, syringes, and package inserts with instructions for performing any methods described herein.

### VI. EXEMPLARY EMBODIMENTS

[0585] Among the provided embodiments are:

[0586] 1. A method of treating a cancer in a subject, the method comprising:

[0587] (a) administering to a subject having a cancer a variant CD80 fusion protein that specifically binds to PD-L1, said variant CD80 fusion protein comprising a variant CD80 extracellular domain or a portion thereof comprising an IgV domain or a specific binding fragment thereof and a multimerization domain, wherein the variant CD80 extracellular domain or the portion thereof comprises one or more amino acid modifications at one or more positions in the sequence of amino acids of the extracellular domain or a portion thereof of an unmodified CD80 polypeptide; and

[0588] (b) administering to the subject a therapeutically effective amount of a PD-1 inhibitor, wherein the PD-1 inhibitor disrupts the interaction between Programmed Death-1 (PD-1) and a ligand thereof.

[0589] 2. The method of embodiment 1 wherein the ligand is Programmed Death Ligand-1 (PD-L1) or PD-L2.

[0590] 3. The method of embodiment 1 or embodiment 2, wherein the PD-1 inhibitor specifically binds to PD-1.

[0591] 4. The method of embodiment 1 or embodiment 2, wherein the PD-1 inhibitor does not compete with the variant CD80 fusion protein for binding to PD-L1.

[0592] 5. The method of any of embodiments 1-4, wherein the PD-1 inhibitor is a peptide, protein, antibody or antigen-binding fragment thereof, or a small molecule.

[0593] 6. The method of any of embodiments 1-5, wherein the PD-1 inhibitor is an antibody or antigen-binding fragment thereof that specifically binds to PD-1.

[0594] 7. The method of any of embodiments 1-6, wherein the antibody or antigen-binding portion is selected from nivolumab, pembrolizumab, MEDI0680 (AMP514), PDR001, cemiplimab (REGN2810), pidilizumab (CT011), or an antigen-binding portion thereof.

[0595] 8. The method of any of embodiments 1-7, wherein the PD-1 inhibitor comprises the extracellular domain of PD-L2 or a portion thereof that binds to PD-1, and an Fc region.

[0596] 9. The method of embodiment 8, wherein the PD-1 inhibitor is AMP-224.

[0597] 10. The method of any of embodiments 1-9, wherein the initiation of the administration of the PD-1 inhibitor is carried out concurrently or sequentially with the initiation of the administration of the variant CD80 fusion protein.

[0598] 11. The method of any of embodiments 1-10, wherein the initiation of the administration of the PD-1 inhibitor is after the initiation of the administration of the variant CD80 fusion protein.

[0599] 12. The method of any of embodiments 1-11, wherein the initiation of the administration of the anti-PD-1 antibody is after the administration of the last dose of a therapeutically effective amount of the variant CD80 fusion protein.

[0600] 13. The method of any of embodiments 1-12, wherein the variant CD80 fusion protein is administered in a therapeutically effective amount as a single dose or in six or fewer multiple doses.

[0601] 14. A method of treating a cancer in a subject, the method comprising administering to a subject having a cancer a therapeutically effective amount of a variant CD80 fusion protein, said variant CD80 fusion protein comprising a variant CD80 extracellular domain or a portion thereof comprising an IgV domain or a specific binding fragment thereof and a multimerization domain, wherein the variant CD80 extracellular domain or the portion thereof comprises one or more amino acid modifications at one or more positions in the sequence of amino acids of the extracellular domain or a portion thereof of an unmodified CD80 polypeptide, wherein the therapeutically effective amount of the variant CD80 fusion protein is administered as a single dose or in six or fewer multiple doses.

[0602] 15. The method of any of embodiments 1-14, wherein the variant CD80 fusion protein is administered parenterally.

[0603] 16. The method of any of embodiments 1-15, wherein the variant CD80 fusion protein is administered subcutaneously.

[0604] 17. The method of any of embodiments 1-15, wherein the variant CD80 fusion protein is administered intravenously.

[0605] 18. The method of any of embodiments 1-17, wherein the variant CD80 fusion protein is administered by injection that is a bolus injection.

[0606] 19. The method of any of embodiments 13-18, wherein the therapeutically effective amount is between about 0.5 mg/kg and about 140 mg/kg, about 0.5 mg/kg and about 30 mg/kg, about 0.5 mg/kg and about 20 mg/kg, about 0.5 mg/kg and about 18 mg/kg, about 0.5 mg/kg and about 12 mg/kg, about 0.5 mg/kg and about 10 mg/kg, about 0.5 mg/kg and about 6 mg/kg, about 0.5 mg/kg and about 3 mg/kg, about 1 mg/kg and about 40 mg/kg, about 1 mg/kg and about 30 mg/kg, about 1 mg/kg and about 20 mg/kg, about 1 mg/kg and about 18 mg/kg, about 1 mg/kg and about 12 mg/kg, about 1 mg/kg and about 10 mg/kg, about 1 mg/kg and about 6 mg/kg, about 1 mg/kg and about 3 mg/kg, about 3 mg/kg and about 40 mg/kg, about 3 mg/kg and about 30 mg/kg, about 3 mg/kg and about 20 mg/kg, about 3 mg/kg and about 18 mg/kg, about 3 mg/kg and about 12 mg/kg, about 3 mg/kg and about 10 mg/kg, about 3 mg/kg and about 6 mg/kg, about 6 mg/kg and about 40 mg/kg, about 6 mg/kg and about 30 mg/kg, about 6 mg/kg and about 20 mg/kg, about 6 mg/kg and about 18 mg/kg, about 6 mg/kg and about 12 mg/kg, about 6 mg/kg and about 10 mg/kg, about 10 mg/kg and about 40 mg/kg, about 10 mg/kg and about 30 mg/kg, about 10 mg/kg and about 20 mg/kg, about 10 mg/kg and about 18 mg/kg, about 10 mg/kg and about 12 mg/kg, about 12 mg/kg and about 40 mg/kg, about 12 mg/kg and about 30 mg/kg, about 12 mg/kg and about 20 mg/kg, about 12 mg/kg and about 18 mg/kg, about 18 mg/kg and about 40 mg/kg, about 18 mg/kg and about 30 mg/kg, about 18 mg/kg and about 20 mg/kg, about 20 mg/kg and about 40 mg/kg, about 20 mg/kg and about 30 mg/kg or about 30 mg/kg and about 40 mg/kg, each inclusive.

[0607] 20. The method of any of embodiments 13-19, wherein the therapeutically effective amount is between about 3.0 mg/kg and 18 mg/kg, inclusive.

[0608] 21. The method of any of embodiments 13-19, wherein the therapeutically effective amount is between about 6 mg/kg and about 20 mg/kg, inclusive.

[0609] 22. The method of any of embodiment 13-19, wherein the therapeutically effective amount is between about 1 mg/kg and about 10 mg/kg, inclusive.

[0610] 23. The method of any of embodiments 13-19 and 22, wherein the therapeutically effective amount is between about 2.0 mg/kg and about 6.0 mg/kg, inclusive.

[0611] 24. The method of any of embodiments 1-23, wherein the variant CD80 fusion protein is administered intratumorally.

[0612] 25. A method of treating a cancer in a subject, the method comprising intratumorally administering to a subject having a cancer a therapeutically effective amount of a variant CD80 fusion protein, said variant CD80 fusion protein comprising a variant CD80 extracellular domain or a portion thereof comprising an IgV domain or a specific binding fragment thereof and a multimerization domain, wherein the variant CD80 extracellular domain or the portion thereof comprises one or more amino acid modifications at one or more positions in the sequence of amino acids of the extracellular domain or a portion thereof of an unmodified CD80 polypeptide.

[0613] 26. The method of embodiment 25, wherein the variant CD80 fusion protein is administered in a therapeutically effective amount as a single dose or in six or fewer multiple doses.

[0614] 27. The method of any of embodiments 1-18 and 24-26, wherein the therapeutically effective amount is between about 0.1 mg/kg and about 1 mg/kg, inclusive.

[0615] 28. The method of any of embodiments 1-18 and 24-27, wherein the therapeutically effective amount is between about 0.2 mg/kg and about 0.6 mg/kg.

[0616] 29. The method of any of embodiments 13-24 and 26-28, wherein the therapeutically effective amount is administered in a single dose.

[0617] 30. The method of any of embodiments 13-24 and 26-28, wherein the therapeutically effective amount is administered in six or fewer multiple doses and the six or fewer multiple doses is two doses, three doses, four doses, five doses or six doses.

[0618] 31. The method of embodiment 30, wherein the therapeutically effective amount is administered in four doses.

[0619] 32. The method of embodiment 30, wherein the therapeutically effective amount is administered in three doses.

[0620] 33. The method of embodiment 30, wherein the therapeutically effective amount is administered in two doses.

[0621] 34. The method of any of embodiments 30-33, wherein each of the six or fewer multiple doses is administered weekly, every two weeks, every three weeks or every four weeks.

[0622] 35. The method of any of embodiments 30-33, wherein the interval between each multiple dose is about a week.

[0623] 36. The methods of any of embodiments 13-19 and 29-35 wherein the single dose or each of the six or fewer multiple doses, individually, is administered in an amount between about 0.5 mg/kg and about 10 mg/kg once every week (Q1W).

[0624] 37. A method of treating a cancer in a subject, the method comprising administering to a subject having a cancer a variant CD80 fusion protein in an amount of between about 1.0 mg/kg to 10 mg/kg, inclusive, once every week (Q1W), wherein said variant CD80 fusion protein comprising a variant CD80 extracellular domain or a portion thereof comprising an IgV domain or a specific binding fragment thereof and a multimerization domain, wherein the variant CD80 extracellular domain or the portion thereof comprises one or more amino acid modifications at one or more positions in the sequence of amino acids of the extracellular domain or a portion thereof of an unmodified CD80 polypeptide, wherein the variant CD80 fusion protein is administered.

[0625] 38. The method of embodiment 36 or 37, wherein the amount of the variant CD80 fusion protein administered Q1W is between about 1 mg/kg and about 3 mg/kg.

[0626] 39. The method of embodiment 36-38, wherein the administration is for more than one week.

[0627] 40. The methods of any of embodiments 13-19, 29-34, wherein the single dose or six or fewer multiple doses, individually, is administered in an amount between about 1.0 mg/kg and about 40 mg/kg once every three weeks (Q3W).

[0628] 41. A method of treating a cancer in a subject, the method comprising administering to a subject having a cancer a variant CD80 fusion protein in an amount of between about 1.0 mg/kg to 40 mg/kg, inclusive, once every three weeks (Q3W), wherein said variant CD80 fusion protein comprising a variant CD80 extracellular domain or a portion thereof comprising an IgV domain or a specific binding fragment thereof and a multimerization domain, wherein the variant CD80 extracellular domain or the portion thereof comprises one or more amino acid modifications at one or more positions in the sequence of amino acids of the extracellular domain or a portion thereof of an unmodified CD80 polypeptide.

[0629] 42. The method of embodiments 39 or embodiment 40, wherein the amount of the variant CD80 fusion protein administered Q3W is between about 3.0 mg/kg and about 10 mg/kg.

[0630] 43. The method of any of embodiments 37-39, 41 and 42, wherein the variant CD80 fusion protein is administered parenterally, optionally subcutaneously.

[0631] 44. The method of any of embodiments 37-39, 41-43, wherein the variant CD80 fusion protein is administered by injection that is a bolus injection.

[0632] 45. The method of any of embodiments 13-44, wherein the therapeutically effective amount is administered in a time period of no more than six weeks.

[0633] 46. The method of any of embodiments 13-44, wherein the therapeutically effective amount is administered in a time period of no more than four weeks or about four weeks.

[0634] 47. The method of any of embodiments 13-44, wherein each multiple dose is an equal amount.

[0635] 48. The method of any of embodiments 1-47, wherein prior to the administering, selecting a subject for treatment that has a tumor comprising cells surface positive for PD-L1 or CD28 and/or surface negative for a cell surface ligand selected from CD80 or CD86.

[0636] 49. A method of treating a cancer in a subject, the method comprising administering a variant CD80 fusion protein to a subject selected as having a tumor comprising cells surface negative for a cell surface ligand selected from CD80 or CD86, and/or surface positive for CD28, wherein the variant CD80 fusion protein comprises a variant CD80 extracellular domain or a portion thereof comprising an IgV domain or a specific binding fragment thereof and a multimerization domain, said variant CD80 extracellular domain or the portion thereof comprising one or more amino acid modifications at one or more positions in the sequence of amino acids of the extracellular domain or a portion thereof of an unmodified CD80 polypeptide.

[0637] 50. The method of embodiment 48 or embodiment 49, wherein the cells surface negative for CD80 or CD86 comprise tumor cells or antigen presenting cells.

[0638] 51. The method of embodiment 48 or embodiment 49, wherein the cells surface positive for CD28 comprise tumor infiltrating T lymphocytes.

[0639] 52. The method of any of embodiments 48-51, wherein the subject has further been selected as having a tumor comprising cells surface positive for PD-L1.

[0640] 53. The method of embodiment 48 or embodiment 52, wherein the cells surface positive for PD-L1 are tumor cells or tumor infiltrating immune cells, optionally tumor infiltrating T lymphocytes.

[0641] 54. The method of any of embodiments 48-53, further comprising determining an immunoscore based on the presence or density of tumor infiltrating T lymphocytes in the tumor of the subject.

[0642] 55. The method of embodiment 54, wherein the subject is selected for treatment if the immunoscore is low.

[0643] 56. The method of any of embodiments 48-55, wherein a subject is selected by immunohistochemistry (IHC) using a reagent that specifically binds to the at least one binding partner.

[0644] 57. The method of any of embodiments 14-56, wherein the variant CD80 fusion protein exhibits increased binding to at least one binding partner selected from among CD28, PD-L1 and CTLA-4 compared to a fusion protein comprising the extracellular domain of the unmodified CD80 for the at least one binding partner.

[0645] 58. The method of any of embodiments 14-57, wherein the variant CD80 fusion protein exhibits increased binding to PD-L1 compared to a fusion protein comprising the extracellular domain of the unmodified CD80 for the binding partner.

[0646] 59. The method of any of embodiments 1-13, wherein the variant CD80 fusion protein further exhibits increased binding to at least one binding partner selected from among CD28 and CTLA-4 compared to a fusion protein comprising the extracellular domain of the unmodified CD80 for the at least one binding partner.

[0647] 60. The method of any of embodiments 1-59, wherein the binding affinity is increased more than 1.2-fold, 1.5-fold, 2-fold, 3-fold, 4-fold, 5-fold, 6-fold, 7-fold, 8-fold, 9-fold, 10-fold, 20-fold, 30-fold, 40-fold, 50-fold, 60-fold, 80-fold, 100-fold, 150-fold, 200-fold, 250-fold, 300-fold, 400-fold, or 450-fold compared to binding affinity of the unmodified CD80 for the ectodomain of the binding partner.

[0648] 61. The method of any of embodiments 1-60, wherein the one or more amino acid modifications are amino acid substitutions.

[0649] 62. The method of any of embodiments 1-61, wherein the one or more amino acid modifications comprise one or more amino acid substitutions selected from among H18Y, A26E, E35D, D46E, D46V, M47I, M47L, M47V, V68M, A71D, A71G, L85M, L85Q or D90G, with reference to numbering of SEQ ID NO:2, or a conservative amino acid substitution thereof.

[0650] 63. The method of any of embodiments 1-62, wherein the one or more amino acid modifications comprise two or more amino acid substitutions selected from among H18Y, A26E, E35D, D46E, D46V, M47I, M47L, M47V, V68M, A71D, A71G, L85M, L85Q or D90G, with reference to numbering of SEQ ID NO:2, or a conservative amino acid substitution thereof.

[0651] 64. The method of any of embodiments 1-63, wherein the one or more amino acid modifications comprises amino acid substitutions H18Y/E35D, E35D/D46E, E35D/D46V, E35D/M47I, E35D/M47L, E35D/M47V, E35D/V68M, E35D/L85M, E35D/L85Q, D46E/M47I, D46E/M47L, D46E/M47V, D46V/M47I, D46V/M47L, D46V/M47L, D46E/V68M, D46V/V68M, H18Y/M47I, H18Y/M47L, H18Y/M47V, M47I/V68M, M47L/V68M or M47V/V68M, M47I/E85M, M47L/E85M, M47V/E85M, M47I/E85Q, M47L/E85Q or M47V/E85Q, with reference to numbering of SEQ ID NO:2.

[0652] 65. The method of any of embodiments 1-64, wherein the one or more amino acid modifications comprise amino acid substitutions E35D/M47L/V68M, E35D/M47V/V68M or E35D/M47I/L70M.

[0653] 66. The method of any of embodiments 1-65, wherein the one or more amino acid modifications comprise amino acid substitutions E35D/M47V/N48K/V68M/K89N.

[0654] 67. The method of any of embodiments 1-65, wherein the one or more amino acid modifications comprise amino acid substitutions H18Y/A26E/E35D/M47L/V68M/A71G/D90G.

[0655] 68. The method of any of embodiments 1-65, wherein the one or more amino acid modifications comprise amino acid substitutions E35D/D46E/M47V/V68M/D90G/K93E.

[0656] 69. The method of any of embodiments 1-65, wherein the one or more amino acid modifications comprise amino acid substitutions E35D/D46V/M47L/V68M/L85Q/E88D.

[0657] 70. The method of any of embodiments 1-69, wherein the unmodified CD80 is a human CD80.

[0658] 71. The method of any of embodiments 1-70, wherein the extracellular domain or portion thereof of the unmodified CD80 comprises (i) the sequence of amino acids set forth in SEQ ID NO:2, (ii) a sequence of amino acids that has at least 95% sequence identity to SEQ ID NO:2; or (iii) is a portion of (i) or (ii) comprising an IgV domain or a specific binding fragment thereof.

[0659] 72. The method of embodiment 71, wherein the extracellular domain or portion thereof of the unmodified CD80 is an extracellular domain portion that is or comprises the IgV domain or a specific binding fragment thereof.

[0660] 73. The method of embodiment 72, wherein the extracellular domain portion of the unmodified CD80 comprises the IgV domain but does not comprise the IgC domain or a portion of the IgC domain.

[0661] 74. The method of embodiment 72 or embodiment 73, wherein the extracellular domain portion of the unmodified CD80 is set forth as the sequence of amino acids 35-135 of SEQ ID NO:2 (SEQ ID NO:76) or 35-141 of SEQ ID NO:2 (SEQ ID NO:150).

[0662] 75. The method of any of embodiments 1-74, wherein the variant CD80 extracellular domain or portion thereof is an extracellular domain portion that does not comprise the IgC domain or a portion of the IgC domain.

[0663] 76. The method of any of embodiments 1-75, wherein the variant CD80 extracellular domain comprises the sequence of amino acids 35-135 of SEQ ID NO:2 (SEQ ID NO:76) or 35-141 of SEQ ID NO:2 (SEQ ID NO:150) in which is contained the one or more amino acid substitutions.

[0664] 77. The method of any of embodiments 1-75, wherein the variant CD80 extracellular domain is the sequence of amino acids 35-135 of SEQ ID NO:2 (SEQ ID NO:76) or 35-141 of SEQ ID NO:2 (SEQ ID NO:150) in which is contained the one or more amino acid substitutions.

[0665] 78. The method of any of embodiments 1-77, wherein the variant CD80 extracellular domain 1, 2, 3, 4, 5, 6, 7, 8, 9, 10, 11, 12, 13, 14, 15, 16, 17, 18, 19 or 20 amino acid modifications, optionally wherein the amino acid modifications are amino acid substitutions.

[0666] 79. The method of any of embodiments 1-78, wherein the variant CD80 extracellular domain comprises no more than 1, 2, 3, 4, 5, 6, 7, 8, 9, 10, 11, 12 or 13 amino acid modifications, optionally wherein the amino acid modifications are amino acid substitutions.

[0667] 80. The method of any of embodiments 1-79, wherein the amino acid sequence of the variant CD80 extracellular domain has at least or at least about 85%, 86%, 87%, 88%, 89%, 90%, 91%, 92%, 93%, 94%, 95%, 96%, 97%, 98%, 99% or more sequence identity to the sequence of amino acids 35-135 of SEQ ID NO:2 (SEQ ID NO:76) or 35-141 of SEQ ID NO:2 (SEQ ID NO:150).

[0668] 81. The method of any of embodiments 1-80, wherein the multimerization domain is an Fc region.

[0669] 82. The method of embodiment 81, wherein the Fc region is of an immunoglobulin G1 (IgG1) or an immunoglobulin G2 (IgG2) protein.

[0670] 83. The method of embodiment 81 or embodiment 82, wherein the Fc region exhibits one or more effector functions.

[0671] 84. The method of embodiment 81 or embodiment 82, wherein the Fc region is a variant Fc region comprising one or more amino acid substitutions in a wildtype Fc region, said variant Fc region exhibiting one or more effector function that is reduced compared to the wildtype Fc region, optionally wherein the wildtype human Fc is of human IgG1.

[0672] 85. The method of embodiment 84, wherein the Fc region comprises the amino acid substitution N297G, wherein the residue is numbered according to the EU index of Kabat.

[0673] 86. The method of embodiment 84, wherein the Fc region comprises the amino acid substitutions R292C/N297G/V302C, wherein the residue is numbered according to the EU index of Kabat.

[0674] 87. The method of embodiment 84, wherein the Fc region comprises the amino acid substitutions L234A/L235E/G237A, wherein the residue is numbered according to the EU index of Kabat.

[0675] 88. The method of any of embodiments 81-87, wherein the Fc region further comprises the amino acid substitution C220S, wherein the residues are numbered according to the EU index of Kabat.

[0676] 89. The method of any of embodiments 81-88, wherein the Fc region comprises K447del, wherein the residue is numbered according to the EU index of Kabat.

[0677] 90. The method of any of embodiments 14-89, wherein the variant CD80 fusion protein antagonizes the activity of CTLA-4.

[0678] 91. The method of any of embodiments 14-90, wherein the variant CD80 fusion protein blocks the PD-1/PD-L1 interaction.

[0679] 92. The method of any of embodiments 14-91, wherein the variant CD80 fusion proteins binds to CD28 and mediates CD28 agonism.

[0680] 93. The method of embodiment 92, wherein the CD28 agonism is PD-L1 dependent.

[0681] 94. The method of any of embodiments 1-93, wherein the subject is a human.

[0682] 95. A kit, comprising:

[0683] (a) a variant CD80 fusion protein that specifically binds to PD-L1, said variant CD80 fusion protein comprising a variant CD80 extracellular domain or a portion thereof comprising an IgV domain or a specific binding fragment thereof and a multimerization domain, wherein the variant CD80 extracellular domain or the portion thereof comprises one or more amino acid modifications at one or more positions in the sequence of amino acids of the extracellular domain or a portion thereof of an unmodified CD80 polypeptide; and

[0684] (b) a PD-1 inhibitor, wherein the PD-1 inhibitor disrupts the interaction between Programmed Death-1 (PD-1) and a ligand thereof.

[0685] 96. The kit of embodiment 95, wherein the ligand is Programmed Death Ligand-1 (PD-L1) or PD-L2.

[0686] 97. The kit of embodiment 95 or embodiment 96, wherein the PD-1 inhibitor specifically binds to PD-1.

[0687] 98. The kit of any of embodiments 95-97, wherein the PD-1 inhibitor does not compete with the variant CD80 fusion protein for binding to PD-L1.

[0688] 99. The kit of embodiment 95, wherein the PD-1 inhibitor is a peptide, protein, antibody or antigen-binding fragment thereof, or a small molecule.

[0689] 100. The kit of embodiment 95-99, wherein the PD-1 inhibitor is an antibody or antigen-binding fragment thereof that specifically binds to PD-1.

[0690] 101. The kit of embodiment 100, wherein the antibody or antigen-binding portion is selected from nivolumab, pembrolizumab, MEDI0680 (AMP514), PDR001, cemiplimab (REGN2810), pidilizumab (CT011), or an antigen-binding portion thereof.

[0691] 102. The kit of any of embodiments 95-99, wherein the PD-1 inhibitor comprises the extracellular domain of PD-L2 or a portion thereof that binds to PD-1, and an Fc region.

[0692] 103. The kit of embodiment 102, wherein the PD-1 inhibitor is AMP-224.

[0693] 104. The kit of any of embodiments 95-103, wherein the variant CD80 fusion protein further exhibits increased binding to at least one binding partner selected from among CD28 and CTLA-4 compared to a fusion protein comprising the extracellular domain of the unmodified CD80 for the at least one binding partner.

[0694] 105. The kit of any of embodiments 95-104, wherein the binding affinity is increased more than 1.2-fold, 1.5-fold, 2-fold, 3-fold, 4-fold, 5-fold, 6-fold, 7-fold, 8-fold, 9-fold, 10-fold, 20-fold, 30-fold, 40-fold, 50-fold, 60-fold, 80-fold, 100-fold, 150-fold, 200-fold, 250-fold, 300-fold, 400-fold, or 450-fold compared to binding affinity of the unmodified CD80 for the ectodomain of the binding partner.

[0695] 106. The kit of any of embodiments 95-105, wherein the one or more amino acid modifications are amino acid substitutions.

[0696] 107. The kit of any of embodiments 95-106, wherein the one or more amino acid modifications comprise one or more amino acid substitutions selected from among H18Y, A26E, E35D, D46E, D46V, M47I, M47L, M47V, V68M, A71D, A71G, L85M, L85Q or D90G, with reference to numbering of SEQ ID NO:2, or a conservative amino acid substitution thereof.

[0697] 108. The kit of any of embodiments 95-107, wherein the one or more amino acid modifications comprise two or more amino acid substitutions selected from among H18Y, A26E, E35D, D46E, D46V, M47I, M47L, M47V, V68M, A71D, A71G, L85M, L85Q or D90G, with reference to numbering of SEQ ID NO:2, or a conservative amino acid substitution thereof.

[0698] 109. The kit of any of embodiments 95-108, wherein the one or more amino acid modifications comprises amino acid substitutions H18Y/E35D, E35D/D46E, E35D/D46V, E35D/M47I, E35D/M47L, E35D/M47V, E35D/V68M, E35D/L85M, E35D/L85Q, D46E/M47I, D46E/M47L, D46E/M47V, D46V/M47I, D46V/M47L, D46V/M47L, D46E/V68M, D46V/V68M, H18Y/M47I, H18Y/M47L, H18Y/M47V, M47I/V68M, M47L/V68M or M47V/V68M, M47I/E85M, M47L/E85M, M47V/E85M, M47I/E85Q, M47L/E85Q or M47V/E85Q, with reference to numbering of SEQ ID NO:2.

[0699] 110. The kit of any of embodiments 95-109, wherein the one or more amino acid modifications comprise amino acid substitutions E35D/M47L/V68M, E35D/M47V/V68M or E35D/M47I/L70M.

[0700] 111. The kit of any of embodiments 95-110, wherein the one or more amino acid modifications comprise amino acid substitutions E35D/M47V/N48K/V68M/K89N, H18Y/A26E/E35D/M47L/V68M/A71G/D90G, E35D/D46E/M47V/V68M/D90G/K93E or E35D/D46V/M47L/V68M/L85Q/E88D.

[0701] 112. The kit of any of embodiments 95-111, wherein the unmodified CD80 is a human CD80.

[0702] 113. The kit of any of embodiments 95-112, wherein the extracellular domain or portion thereof of the unmodified CD80 comprises (i) the sequence of amino acids set forth in SEQ ID NO:2, (ii) a sequence of amino acids that has at least 95% sequence identity to SEQ ID NO:2; or (iii) is a portion of (i) or (ii) comprising an IgV domain or a specific binding fragment thereof.

[0703] 114. The kit of embodiment 113, wherein the extracellular domain or portion thereof of the unmodified CD80 is an extracellular domain portion that is or comprises the IgV domain or a specific binding fragment thereof.

[0704] 115. The kit of embodiment 114, wherein the extracellular domain portion of the unmodified CD80 comprises the IgV domain but does not comprise the IgC domain or a portion of the IgC domain.

[0705] 116. The kit of embodiment 114 or embodiment 115, wherein the extracellular domain portion of the unmodified CD80 is set forth as the sequence of amino acids 35-135 of SEQ ID NO:2 (SEQ ID NO:76) or 35-141 of SEQ ID NO:2 (SEQ ID NO:150).

[0706] 117. The kit of any of embodiments 95-116, wherein the variant CD80 extracellular domain or portion thereof is an extracellular domain portion that does not comprise the IgC domain or a portion of the IgC domain.

[0707] 118. The kit of any of embodiments 95-117, wherein the variant CD80 extracellular domain comprises the sequence of amino acids 35-135 of SEQ ID NO:2 (SEQ ID NO:76) or 35-141 of SEQ ID NO:2 (SEQ ID NO:150) in which is contained the one or more amino acid substitutions.

[0708] 119. The kit of any of embodiments 95-118, wherein the variant CD80 extracellular domain is the sequence of amino acids 35-135 of SEQ ID NO:2 (SEQ ID NO:76) or 35-141 of SEQ ID NO:2 (SEQ ID NO:150) in which is contained the one or more amino acid substitutions.

[0709] 120. The kit of any of embodiments 95-119, wherein the variant CD80 extracellular domain 1, 2, 3, 4, 5, 6, 7, 8, 9, 10, 11, 12, 13, 14, 15, 16, 17, 18, 19 or 20 amino acid modifications, optionally wherein the amino acid modifications are amino acid substitutions.

[0710] 121. The kit of any of embodiments 95-120, wherein the variant CD80 extracellular domain comprises no more than 1, 2, 3, 4, 5, 6, 7, 8, 9, 10, 11, 12 or 13 amino acid modifications, optionally wherein the amino acid modifications are amino acid substitutions.

[0711] 122. The kit of any of embodiments 95-121, wherein the variant CD80 extracellular domain has at least or at least about 85%, 86%, 87%, 88%, 89%, 90%, 91%, 92%, 93%, 94%, 95%, 96%, 97%, 98%, 99% or more sequence identity to the sequence of amino acids 35-135 of SEQ ID NO:2 (SEQ ID NO:76) or 35-141 of SEQ ID NO:2 (SEQ ID NO:150).

[0712] 123. The kit of any of embodiments 1-122, wherein the multimerization domain is an Fc region.

[0713] 124. The kit of embodiment 123, wherein the Fc region is of an immunoglobulin G1 (IgG1) or an immunoglobulin G2 (IgG2) protein.

[0714] 125. The kit of embodiment 123 or embodiment 124, wherein the Fc region exhibits one or more effector functions.

[0715] 126. The kit of any of embodiments 123-125, wherein the Fc region is a variant Fc region comprising one or more amino acid substitutions in a wildtype Fc region, said variant Fc region exhibiting one or more effector function that is reduced compared to the wildtype Fc region, optionally wherein the wildtype human Fc is of human IgG1.

[0716] 127. An article of manufacture comprising the kit of any of embodiments 95-126 and instructions for use.

[0717] 128. The article of manufacture of embodiment 127, wherein the instructions provide information for administration of the variant CD80 Fc fusion protein or PD-1 inhibitor in accord with the methods 1-13, 19-24 and 27-94.

[0718] 129. A multivalent CD80 polypeptide comprising two copies of a fusion protein comprising: (1) at least two variant CD80 extracellular domains or a portion thereof comprising an IgV domain or a specific binding fragment thereof (vCD80), wherein the vCD80 comprises one or more amino acid modifications at one or more positions in the sequence of amino acids of the extracellular domain or a portion thereof of an unmodified CD80 polypeptide and (2) an Fc polypeptide.

[0719] 130. The multivalent CD80 polypeptide of embodiment 129, wherein the polypeptide is tetravalent.

[0720] 131. The multivalent CD80 polypeptide of embodiment 129 or embodiment 130, wherein the fusion protein comprises the structure: (vCD80)-Linker-Fc-Linker-(vCD80).

[0721] 132. The multivalent CD80 polypeptide of embodiment 129 or embodiment 130, wherein the fusion protein comprises the structure: (vCD80)-Linker-(vCD80)-Linker-Fc.

[0722] 133. The multivalent CD80 polypeptide of embodiment 132, wherein the vCD80 exhibits increased binding to at least one binding partner selected from among CD28, PD-L1 and CTLA-4 compared to a vCD80 comprising the extracellular domain of the unmodified CD80 for the at least one binding partner.

[0723] 134. The multivalent CD80 polypeptide of embodiment 133, wherein the affinity is increased more than 1.2-fold, 1.5-fold, 2-fold, 3-fold, 4-fold, 5-fold, 6-fold, 7-fold, 8-fold, 9-fold, 10-fold, 20-fold, 30-fold, 40-fold, 50-fold, 60-fold, 80-fold, 100-fold, 150-fold, 200-fold, 250-fold, 300-fold, 400-fold, or 450-fold compared to binding affinity of the unmodified CD80 for the ectodomain of the binding partner.

[0724] 135. The multivalent CD80 polypeptide of any of embodiments 129-134, wherein the one or more amino acid modifications are amino acid substitutions.

[0725] 136. The multivalent CD80 polypeptide of any of embodiments 129-135, wherein the one or more amino acid modifications comprise one or more amino acid substitutions selected from among H18Y, A26E, E35D, D46E, D46V, M47I, M47L, M47V, V68M, A71D, A71G, L85M, L85Q or D90G, with reference to numbering of SEQ ID NO:2, or a conservative amino acid substitution thereof.

[0726] 137. The multivalent CD80 polypeptide of any of embodiments 129-136, wherein the one or more amino acid modifications comprise two or more amino acid substitutions selected from among H18Y, A26E, E35D, D46E, D46V, M47I, M47L, M47V, V68M, A71D, A71G, L85M, L85Q or D90G, with reference to numbering of SEQ ID NO:2, or a conservative amino acid substitution thereof.

[0727] 138. The multivalent CD80 polypeptide of any of embodiments 129-137, wherein the one or more amino acid modifications comprises amino acid substitutions H18Y/E35D, E35D/D46E, E35D/D46V, E35D/M47I, E35D/M47L, E35D/M47V, E35D/V68M, E35D/L85M, E35D/L85Q, D46E/M47I, D46E/M47L, D46E/M47V, D46V/M47I, D46V/M47L, D46V/M47L, D46E/V68M, D46V/V68M, H18Y/M47I, H18Y/M47L, H18Y/M47V, M47I/V68M, M47L/V68M or M47V/V68M, M47I/E85M, M47L/E85M, M47V/E85M, M47I/E85Q, M47L/E85Q or M47V/E85Q, with reference to numbering of SEQ ID NO:2.

[0728] 139. The multivalent CD80 polypeptide of any of embodiments 129-138, wherein the one or more amino acid modifications comprise amino acid substitutions E35D/M47L/V68M, E35D/M47V/V68M or E35D/M47I/L70M.

[0729] 140. The multivalent CD80 polypeptide of any of embodiments 129-139, wherein the one or more amino acid modifications comprise amino acid substitutions E35D/M47V/N48K/V68M/K89N, H18Y/A26E/E35D/M47L/V68M/A71G/D90G, E35D/D46E/M47V/V68M/D90G/K93E or E35D/D46V/M47L/V68M/L85Q/E88D.

[0730] 141. The multivalent CD80 polypeptide of any of embodiments 129-140, wherein the unmodified CD80 is a human CD80.

[0731] 142. The multivalent CD80 polypeptide of any of embodiments 129-141, wherein the extracellular domain or portion thereof of the unmodified CD80 comprises (i) the sequence of amino acids set forth in SEQ ID NO:2, (ii) a sequence of amino acids that has at least 95% sequence identity to SEQ ID NO:2; or (iii) is a portion of (i) or (ii) comprising an IgV domain or a specific binding fragment thereof.

[0732] 143. The multivalent CD80 polypeptide of embodiment 142, wherein the extracellular domain or portion thereof of the unmodified CD80 is an extracellular domain portion that is or comprises the IgV domain or a specific binding fragment thereof.

[0733] 144. The multivalent CD80 polypeptide of embodiment 143, wherein the extracellular domain portion of the unmodified CD80 comprises the IgV domain but does not comprise the IgC domain or a portion of the IgC domain.

[0734] 145. The multivalent CD80 polypeptide of embodiment 143 or embodiment 144, wherein the extracellular domain portion of the unmodified CD80 is set forth as the sequence of amino acids 35-135 of SEQ ID NO:2 (SEQ ID NO:76) or 35-141 of SEQ ID NO:2 (SEQ ID NO:150).

[0735] 146. The multivalent CD80 polypeptide of any of embodiments 129-145, wherein the vCD80 is an extracellular domain portion that does not comprise the IgC domain or a portion of the IgC domain.

[0736] 147. The multivalent CD80 polypeptide of any of embodiments 129-146, wherein the vCD80 comprises the sequence of amino acids 35-135 of SEQ ID NO:2 (SEQ ID NO:76) or 35-141 of SEQ ID NO:2 (SEQ ID NO:150) in which is contained the one or more amino acid substitutions.

[0737] 148. The multivalent CD80 polypeptide of any of embodiments 129-147, wherein the vCD80 has the sequence of amino acids 35-135 of SEQ ID NO:2 (SEQ ID NO:76) or 35-141 of SEQ ID NO:2 (SEQ ID NO:150) in which is contained the one or more amino acid substitutions.

[0738] 149. The multivalent CD80 polypeptide of any of embodiments 129-148, wherein the vCD80 comprises 1, 2, 3, 4, 5, 6, 7, 8, 9, 10, 11, 12, 13, 14, 15, 16, 17, 18, 19 or 20 amino acid modifications, optionally wherein the amino acid modifications are amino acid substitutions.

[0739] 150. The multivalent CD80 polypeptide of any of embodiments 129-149, wherein the vCD80 comprises no more than 1, 2, 3, 4, 5, 6, 7, 8, 9, 10, 11, 12 or 13 amino acid modifications, optionally wherein the amino acid modifications are amino acid substitutions.

[0740] 151. The multivalent CD80 polypeptide of any of embodiments 129-150, wherein the vCD80 has at least or at least about 85%, 86%, 87%, 88%, 89%, 90%, 91%, 92%, 93%, 94%, 95%, 96%, 97%, 98%, 99% or more sequence identity to the sequence of amino acids 35-135 of SEQ ID NO:2 (SEQ ID NO:76) or 35-141 of SEQ ID NO:2 (SEQ ID NO:150).

[0741] 152. The multivalent CD80 polypeptide of any of embodiments 129-151, wherein the multimerization domain is an Fc region.

[0742] 153. The multivalent CD80 polypeptide of any of embodiments 129-152, wherein the Fc region is of an immunoglobulin G1 (IgG1) or an immunoglobulin G2 (IgG2) protein.

[0743] 154. The multivalent CD80 polypeptide of embodiment 152 or embodiment 153, wherein the Fc region exhibits one or more effector functions.

[0744] 155. The multivalent CD80 polypeptide of embodiment 154 or embodiment 153, wherein the Fc region is a variant Fc region comprising one or more amino acid substitutions in a wildtype Fc region, said variant Fc region exhibiting one or more effector function that is reduced compared to the wildtype Fc region, optionally wherein the wildtype human Fc is of human IgG1.

[0745] 156. The multivalent CD80 polypeptide of any of embodiments 129-155, wherein each vCD80 is the same.

[0746] 157. The multivalent CD80 polypeptide of any of embodiments 129-156, wherein the linker is a flexible linker.

[0747] 158. The multivalent CD80 polypeptide of any of embodiments 129-157, wherein the linker is a peptide linker.

[0748] 159. The multivalent CD80 polypeptide of embodiment 158, wherein the linker is GSGGGGS (SEQ ID NO:1522) or 3× GGGGS (SEQ ID NO: 1504).

[0749] 160. A nucleic acid molecule encoding the multivalent CD80 polypeptide of any of embodiments 129-159.

[0750] 161. A vector comprising the nucleic acid of embodiment 160.

[0751] 162. The vector of embodiment 161 that is an expression vector.

[0752] 163. A host cell comprising the nucleic acid of embodiment 160 or the vector of embodiment 161 or embodiment 162.

[0753] 164. A method of producing a multivalent CD80 polypeptide of any of embodiments 129-159, comprising introducing the nucleic acid of embodiment 160 or the vector of embodiment 161 or embodiment 162 into a host cell under conditions to express the protein in the cell.

[0754] 165. The method of embodiment 164, further comprising isolating or purifying the protein comprising the multivalent CD80 polypeptide.

[0755] 166. A pharmaceutical composition comprising the multivalent CD80 polypeptide of any of embodiments 129-159.

[0756] 167. The pharmaceutical composition of embodiment 166, comprising a pharmaceutically acceptable excipient.

[0757] 168. The pharmaceutical composition of embodiment 166 or embodiment 167, wherein the pharmaceutical composition is sterile.

[0758] 169. An article of manufacture comprising the pharmaceutical composition of any of embodiments 166-168 in a container, optionally wherein the container is a vial.

[0759] 170. The article of manufacture of embodiment 169, wherein the container is sealed.

[0760] 171. A method of modulating an immune response in a subject, comprising administering the pharmaceutical composition of any of embodiments 166-168 to a subject or the multivalent CD80 polypeptide of any of embodiments 129-170 to a subject.

[0761] 172. The method of any of embodiment 171, wherein modeling the immune response treats a disease or condition in the subject.

[0762] 173. The method of embodiment 172, wherein the disease or condition is a tumor or cancer.

[0763] 174. A method of treating a cancer in a subject, comprising administering the pharmaceutical composition of any of embodiments 166-168 to a subject or the multivalent CD80 polypeptide of any of embodiments 129-171 to a subject.

[0764] 175. A variant CD80 fusion protein comprising: (i) a variant extracellular domain comprising one or more amino acid substitutions at one or more positions in the sequence of amino acids set forth as amino acid residues 35-230 of a wildtype human CD80 extracellular domain corresponding to residues set forth in SEQ ID NO:1 and (ii) an Fc region that has effector activity, wherein the extracellular domain of the variant CD80 fusion protein specifically binds to the ectodomain of human CD28 and does not bind to the ectodomain of human PD-L1 or binds to the ectodomain of PD-L1 with a similar binding affinity as the extracellular domain of the wildtype human CD80 for the ectodomain of PD-L1.

[0765] 176. The variant CD80 fusion protein of embodiment 175, wherein the extracellular domain of the variant CD80 fusion protein exhibits increased binding affinity to the ectodomain of human CTLA-4 compared to the binding affinity of the extracellular domain of wildtype CD80 for the ectodomain of human CTLA-4.

[0766] 177. The variant CD80 fusion protein of embodiment 175 or embodiment 176, wherein the extracellular domain of the variant CD80 fusion protein exhibits increased binding affinity to the ectodomain of human CD28 compared to the binding affinity of the extracellular domain of wildtype CD80 for the ectodomain of human CD28.

[0767] 178. The variant CD80 fusion protein of embodiment 176 or embodiment 177, wherein the affinity is increased about or greater than 1.2-fold, 1.5-fold, 2-fold, 3-fold, 4-fold, 5-fold, 6-fold, 7-fold, 8-fold, 9-fold, 10-fold or more.

[0768] 179. The variant CD80 fusion protein of any of embodiments 175-178, wherein:

[0769] the variant CD80 fusion protein increases immunological activity as assessed in a mixed lymphocyte reaction, optionally wherein the increased immunological activity comprises increased production of IFN-gamma or interleukin 2 in the mixed lymphocyte reaction; and/or

[0770] the variant CD80 fusion protein increases immunological activity as assessed in a T cell reporter assay incubated with antigen presenting cells.

[0771] 180. The variant CD80 fusion protein of any of embodiments 175-179, wherein the variant CD80 fusion protein increases CD28-mediated costimulation of T lymphocytes.

[0772] 181. The variant CD80 fusion protein of embodiment 179 or embodiment 180, wherein the increase is by about or greater than 1.2-fold, 1.5-fold, 2-fold, 3-fold, 4-fold, 5-fold, 6-fold, 7-fold, 8-fold, 9-fold, 10-fold or more.

[0773] 182. The variant CD80 fusion protein of any of embodiments 175-181, wherein the wildtype human CD80 extracellular domain has the sequence of amino acids set forth in SEQ ID NO:2 or a sequence that has at least 95%, 96%, 97%, 98%, 99% or more sequence identity to SEQ ID NO:2.

[0774] 183. The variant CD80 fusion protein of any of embodiments 175-182, wherein the wildtype human CD80 extracellular domain has the sequence of amino acids set forth in SEQ ID NO:2.

[0775] 184. The variant CD80 fusion protein of any of embodiments 175-183, wherein the one or more amino acid substitutions comprise one or more amino acid substitutions selected from L70Q, K89R, D90G, D90K, A91G, F92Y, K93R, I118V, T120S or T130A, with reference to numbering set forth in SEQ ID NO:2, or a conservative amino acid substitution thereof.

[0776] 185. The variant CD80 fusion protein of any of embodiments 175-184, wherein the one or more amino acid substitutions comprise two or more amino acid substitutions selected from L70Q, K89R, D90G, D90K, A91G, F92Y, K93R, I118V, T120S or T130A, with reference to numbering set forth in SEQ ID NO:2, or a conservative amino acid substitution thereof.

[0777] 186. The variant CD80 fusion protein of embodiment 184 or embodiment 185, wherein the one or more amino acid substitutions comprise amino acid modifications L70Q/K89R, L70Q/D90G, L70Q/D90K, L70Q/A91G, L70Q/F92Y, L70Q/K93R, L70Q/I118V, L70Q/T120S, L70Q/T130A, K89R/D90G, K89R/D90K, K89R/A91G, K89R/F92Y, K89R/K93R, K89R/I118V, K89R/T120S, K89R/T130A, D90G/A91G, D90G/F92Y, D90G/K93R, D90G/I118V, D90G/T120S, D90G/T130A, D90K/A91G, D90K/F92Y, D90K/K93R, D90K/I118V, D90K/T120S, D90K/T130A, F92Y/K93R, F92Y/I118V, F92Y/T120S, F92Y/T130A, K93R/I118V, K93R/T120S, K93R/T130A, I118V/T120S, I118V/T130A or T120S/T130A.

[0778] 187. The variant CD80 fusion protein of any of embodiments 175-186, wherein the one or more amino acid substitutions comprise amino acid substitutions A91G/I118V/T120S/T130A.

[0779] 188. The variant CD80 fusion protein of any of embodiments 175-186, wherein the one or more amino acid substitutions comprise amino acid substitutions S21P/L70Q/D90G/I118V/T120S/T130A.

[0780] 189. The variant CD80 fusion protein of any of embodiments 175-186, wherein the one or more amino acid substitutions comprise amino acid substitutions E88D/K89R/D90K/A91G/F92Y/K93R.

[0781] 190. The variant CD80 fusion protein of any of embodiments 175-183, wherein the one or more amino acid substitutions comprise one or more amino acid substitutions selected from substitutions selected from among H18Y, A26E, E35D, D46E, D46V, M47I, M47L, M47V, V68M, A71D, A71G, L85M, L85Q or D90G, with reference to numbering of SEQ ID NO:2, or a conservative amino acid substitution thereof.

[0782] 191. The variant CD80 fusion protein of embodiment 190, wherein the one or more amino acid substitutions comprises amino acid substitutions H18Y/E35D, E35D/D46E, E35D/D46V, E35D/M47I, E35D/M47L, E35D/M47V, E35D/V68M, E35D/L85M, E35D/L85Q, D46E/M47I, D46E/M47L, D46E/M47V, D46V/M47I, D46V/M47L, D46V/M47L, D46E/V68M, D46V/V68M, H18Y/M47I, H18Y/M47L, H18Y/M47V, M47I/V68M, M47L/V68M or M47V/V68M, M47I/E85M, M47L/E85M, M47V/E85M, M47I/E85Q, M47L/E85Q or M47V/E85Q, with reference to numbering of SEQ ID NO:2.

[0783] 192. The variant CD80 fusion protein of any of embodiments 175-183, 190 and 191, wherein the one or more amino acid modifications comprise amino acid substitutions E35D/M47L/V68M, E35D/M47V/V68M or E35D/M47I/L70M.

[0784] 193. The variant CD80 fusion protein of any of embodiments 175-183, and 190-192, wherein the one or more amino acid modifications comprise amino acid substitutions E35D/M47V/N48K/V68M/K89N, H18Y/A26E/E35D/M47L/V68M/A71G/D90G, E35D/D46E/M47V/V68M/D90G/K93E or E35D/D46V/M47L/V68M/L85Q/E88D.

[0785] 194. The variant CD80 fusion protein of any of embodiments 175-193, wherein the variant CD80 extracellular domain has 1, 2, 3, 4, 5, 6, 7, 8, 9, 10, 11, 12, 13, 14, 15, 16, 17, 18, 19 or 20 amino acid substitutions.

[0786] 195. The variant CD80 fusion protein of any of embodiments 175-194, wherein the variant CD80 extracellular domain comprises no more than 1, 2, 3, 4, 5, 6, 7, 8, 9, 10, 11, 12 or 13 amino acid substitutions.

[0787] 196. The variant CD80 fusion protein of any of embodiments 175-195, wherein the variant CD80 extracellular domain has at least or at least about 85%, 86%, 87%, 88%, 89%, 90%, 91%, 92%, 93%, 94%, 95%, 96%, 97%, 98%, 99% or more sequence identity to the sequence of amino acids set forth in SEQ ID NO:2.

[0788] 197. The variant CD80 fusion protein of any of embodiments 175-196, wherein the Fc region is of an immunoglobulin G1 (IgG1).

[0789] 198. The variant CD80 fusion protein of any of embodiments 175-197, wherein the Fc region comprises the amino acid substitution C220S, wherein the residues are numbered according to the EU index of Kabat.

[0790] 199. The variant CD80 fusion protein of any of embodiments 175-198, wherein the Fc region comprises K447del, wherein the residue is numbered according to the EU index of Kabat.

[0791] 200. The variant CD80 fusion protein of any of embodiments 175-199, wherein the Fc region as the sequence of amino acids set forth in SEQ ID NO: 1502, 1510, 1517 or 1527.

[0792] 201. The variant CD80 fusion protein of any of embodiments 175-200, wherein the one or more effector function is selected from among antibody dependent cellular cytotoxicity (ADCC), complement dependent cytotoxicity, programmed cell death and cellular phagocytosis.

[0793] 202. The variant CD80 fusion protein of any of embodiments 175-201 that is a dimer.

[0794] 203. A nucleic acid molecule encoding the variant CD80 fusion protein of any of embodiments 175-202.

[0795] 204. A vector comprising the nucleic acid of embodiment 203.

[0796] 205. The vector of embodiment 204 that is an expression vector.

[0797] 206. A host cell comprising the nucleic acid of embodiment 203 or the vector of embodiment 204 or embodiment 205.

[0798] 207. A method of producing a variant CD80 fusion protein of any of embodiments 175-202, comprising introducing the nucleic acid of embodiment 203 or the vector of embodiment 204 or embodiment 205 into a host cell under conditions to express the protein in the cell.

[0799] 208. The method of embodiment 207, further comprising isolating or purifying the protein comprising the variant CD80 fusion protein.

[0800] 209. A pharmaceutical composition comprising the variant CD80 fusion protein of any of embodiments 175-202.

[0801] 210. The pharmaceutical composition of embodiment 209, comprising a pharmaceutically acceptable excipient.

[0802] 211. The pharmaceutical composition of embodiment 209 or embodiment 210, wherein the pharmaceutical composition is sterile.

[0803] 212. An article of manufacture comprising the pharmaceutical composition of any of embodiments 209-211 in a container, optionally wherein the container is a vial.

[0804] 213. The article of manufacture of embodiment 212, wherein the container is sealed.

[0805] 214. A method of modulating an immune response in a subject, comprising administering the pharmaceutical composition of any of embodiments 209-211 to a subject or the variant CD80 fusion protein of any of embodiments 175-202 to a subject.

[0806] 215. The method of any of embodiment 214, wherein modulating the immune response treats a disease or condition in the subject.

[0807] 216. The method of embodiment 215, wherein the disease or condition is a tumor or cancer.

[0808] 217. A method of treating a cancer in a subject, comprising administering the pharmaceutical composition of any of embodiments 209-211 to a subject or the variant CD80 fusion protein of any of embodiments 175-202 to a subject.

### VII. EXAMPLES

[0809] The following examples are included for illustrative purposes only and are not intended to limit the scope of the invention.

### Example 1

### Generation of Mutant DNA Constructs of IgSF Domains

[0810] Example 1 describes the generation of mutant DNA constructs of human CD80 IgSF domains for translation and expression on the surface of yeast as yeast display libraries.

[0811] A. Degenerate Libraries

[0812] Constructs were generated based on a wildtype human CD80 sequence set forth in SEQ ID NO:150, containing the immunoglobulin-like V-type (IgV) domain as follows:

(SEQ ID NO: 150)
VIHVTKEVKEVATLSCGHNVSVEELAQTRIYWQKE
KKMVLTMMSGDMNIWPEYKNRTIFDITNNLSIVIL
ALRPSDEGTYECVVLKYEKDAFKREHLAEVTLSV
KAD

[0813] For libraries that target specific residues for complete or partial randomization with degenerate codons, degenerate codons, such as specific mixed base sets to code for various amino acid substitutions, were generated using an algorithm at the URL: rosettadesign.med.unc.edu/SwiftLib/. In general, positions to mutate were chosen from crystal structure information for CD80 bound to CTLA-4 at the URL: rcsb.org/pdb/explore/explore.do?structureId=1I8L, and a targeted library was designed based on the CD80::CTLA-4 interface for selection of improved binders to CTLA-4. For example, the structural information was used to identify contact or non-contact interface residues for mutagenesis with degenerate codons. This analysis was performed using a structure viewer available at the URL: spdbv.vital-it.ch.

[0814] The next step in library design was the alignment of human, mouse, rat, and monkey CD80 sequences to identify which of the residues chosen for mutagenesis were conserved residues. Based on this analysis, conserved target residues were mutated with degenerate codons that only specified conservative amino acid changes plus the wild-type residue. Residues that were not conserved were mutated more aggressively, but also included the wild-type residue. Degenerate codons that also encoded the wild-type residue were deployed to avoid excessive mutagenesis of target protein. For the same reason, only up to 20 positions were targeted for mutagenesis for each library. Mutational analysis was focused on contact and non-contact interfacial residues that were within 6 Å of the binding surface with their side chains directed toward the ligand/counter structure.

[0815] To generate DNA encoding the targeted library, overlapping oligos of up to 80 nucleotides in length and containing degenerate codons at the residue positions targeted for mutagenesis, were ordered from Integrated DNA Technologies (Coralville, USA). The oligonucleotides were dissolved in sterile water, mixed in equimolar ratios, heated to 95° C. for five minutes and slowly cooled to room temperature for annealing. IgV domain-specific oligonucleotide primers that anneal to the start and end of the IgV domain gene sequence were then used to generate PCR product. IgV domain-specific oligonucleotides which overlap by 40 bp with pBYDS03 cloning vector (Life Technologies, USA), beyond and including the BamHI and KpnI cloning sites, were then used to amplify 100 ng of PCR product from the prior step to generate a total of at least 12 μg of DNA for every electroporation. Both polymerase chain reactions (PCRs) used OneTaq 2× PCR master mix (New England Biolabs, USA). The products from the second PCR were purified using a PCR purification kit (Qiagen, Germany) and resuspended in sterile deionized water. Alternatively, Ultramers® (Integrated DNA Technologies) of up to 200 bp in length were used in conjunction with megaprimer PCR (URL: http://www.ncbi.nlm.nih.gov/pmc/articles/PMC146891/pdf/253371.pdf) to generate larger stretches of degenerate codons that could not be as easily incorporated using multiple small overlapping primers. Following the generation of full length product using megaprimer PCR, the mutant IgV domain library was PCR amplified again using DNA primers containing 40 bp overlap region with pBYDS03 cloning variant for homologous recombination into yeast.

[0816] To prepare for library insertion, pBYDS03 vector was digested with BamHI and KpnI restriction enzymes (New England Biolabs, USA) and the large vector fragment was gel-purified and dissolved in sterile, deionized water. Electroporation-ready DNA for the next step was generated by mixing 12 μg of library DNA insert with 4 μg of linearized vector in a total volume of 50 μL deionized and sterile water. An alternative method to generate targeted libraries, is to carry out site-directed mutagenesis (Multisite kit, Agilent, USA) of the target IgV domain with oligonucleotides containing degenerate codons. This approach is used to generate sublibraries that only target a few specific stretches of DNA for mutagenesis. In these cases, sublibraries are mixed before proceeding to the selection steps. In general, library sizes were in the range of 10E7 to 10E8 clones, except that sublibraries were only in the range of 10E4 to 10E5.

[0817] B. Random Libraries

[0818] Random libraries were also constructed to identify variants of the IgV domain of CD80 set forth in SEQ ID NO:150 (containing the IgV domain). DNA encoding the wild-type CD80 IgV domain was cloned between the BamHI and KpnI sites of yeast display vector pBYDS03 and then released using the same restriction enzymes. The released DNA was then mutagenized with the Genemorph II Kit (Agilent Genomics, USA) to generate an average of three to five amino acid changes per library variant. Mutagenized DNA was then amplified by the two-step PCR and further processed as described above for targeted libraries.

[0819] After completing several rounds of selection using beads and iterative FACS, a pool of clones were further mutated via error prone PCR. Thus, a second generation mutant library was created following the steps outlined as above though using selection output DNA as template rather than wildtype IgV plasmid sequence as template.

### Example 2

### Introduction of DNA Libraries into Yeast

[0820] To introduce degenerate and random CD80 library DNA into yeast, electroporation-competent cells of yeast strain BJ5464 (ATCC.org; ATCC number 208288) were prepared and electroporated on a Gene Pulser II (Biorad, USA) with the electroporation-ready DNA from the steps above essentially as described (Colby, D. W. et al. 2004 Methods Enzymology 388, 348-358). The only exception was that transformed cells were grown in non-inducing minimal selective SCD-Leu medium to accommodate the LEU2 selective marker carried by modified plasmid pBYDS03. One liter of SCD-Leu media consists of 14.7 grams of sodium citrate, 4.29 grams of citric acid monohydrate, 20 grams of dextrose, 6.7 grams of yeast nitrogen base, and 1.6 grams yeast synthetic drop-out media supplement without leucine. The Medium was filter sterilized before use, using a 0.22 μm vacuum filter device.

[0821] Library size was determined by plating dilutions of freshly recovered cells on SCD-Leu agar plates and then extrapolating library size from the number of single colonies from plating that generated at least 50 colonies per plate. The remainder of the electroporated culture was grown to saturation and cells from this culture were subcultured 1/100 into the same medium once more and grown to saturation to minimize the fraction of untransformed cells and to allow for segregation of plasmid from cells that may contain two or more library variants. To maintain library diversity, this subculturing step was carried out using an inoculum that contained at least 10× more cells than the calculated library size. Cells from the second saturated culture were resuspended in fresh medium containing sterile 25% (weight/volume) glycerol to a density of 10E10/mL and frozen and stored at −80° C. (frozen library stock).

### Example 3

### Yeast Selection

[0822] Example 3 describes the selection of yeast cells expressing affinity-modified variants of CD80. It has been well-established that CTLA-4 binding to CD80 antagonizes CD28 binding to CD80 (Schwartz J. C. et al. Nature 410, 604-08, 2001). To identify CD80 mutants that selectively bind CTLA-4 over CD28, cells from the CD80 mutant libraries were subjected to iterative rounds of positive and negative FACS sorting and mutagenesis.

[0823] A number of cells equal to at least 10 times the estimated library size were thawed from individual library stocks, suspended to 1.0×10E6 cells/mL in non-inducing SCD-Leu medium, and grown overnight. The next day, a number of cells equal to 10 times the library size were centrifuged at 2000 RPM for two minutes and resuspended to 0.5×10E6 cells/mL in inducing SCDG-Leu media. One liter of SCDG-Leu induction media consists of 5.4 grams Na₂HPO₄, 8.56 grams NaH₂PO₄.H₂O, 20 grams galactose, 2.0 grams dextrose, 6.7 grams yeast nitrogen base, and 1.6 grams yeast synthetic drop out media supplement without leucine dissolved in water and sterilized through a 0.22 μm membrane filter device. The culture was grown in induction medium for 1 day at room temperature to induce expression of library proteins on the yeast cell surface.

[0824] Cells were sorted twice using Protein A magnetic beads (New England Biolabs, USA) loaded with cognate ligand to reduce non-binders and enrich for all CD80 variants with the ability to bind their exogenous recombinant counter-structure proteins. This was then followed by multiple rounds of fluorescence activated cell sorting (FACS) using exogenous counter-structure protein staining to enrich the fraction of yeast cells that displays improved binding to CTLA-4-Fc (R&D Systems, USA). These positive selections were alternated with negative FACS selections to remove CD80 clones that bound to CD28-Fc. Magnetic bead enrichment and selections by flow cytometry were carried out essentially as described in Miller K. D., et al., Current Protocols in Cytometry 4.7.1-4.7.30, July 2008.

[0825] With CD80 libraries, target ligand proteins were employed as follows: internally produced human rCTLA-4-Fc, human rCD28-Fc, and human rPD-L1 (R&D Systems, Minneapolis, USA). Magnetic Protein A beads were obtained from New England Biolabs, USA. For two-color, flow cytometric sorting, a Bio-Rad S3e sorter was used. CD80 display levels were monitored with an anti-hemagglutinin (HA) antibody labeled with Alexafluor 488 (Life Technologies, USA). Ligand binding of Fc fusion proteins, rCTLA-4Fc, rPD-L1 or rCD28Fc, were detected with PE conjugated human Ig specific goat Fab (Jackson ImmunoResearch, USA). Doublet yeast were gated out using forward scatter (FSC)/side scatter (SSC) parameters, and sort gates were based upon higher ligand binding detected in FL2 that possessed more limited tag expression binding in FL1.

[0826] Yeast outputs from the flow cytometric sorts were assayed for higher specific binding affinity. Sort output yeast were expanded and re-induced to express the particular IgSF affinity modified domain variants they encode. This population then can be compared to the parental, wild-type yeast strain, or any other selected outputs, such as the bead output yeast population, by flow cytometry.

[0827] For CD80, the second FACS outputs (F2) were compared to parental CD80 yeast for binding rCTLA-4Fc, rPD-L1, or rCD28Fc by double staining each population with anti-HA (hemagglutinin) tag expression and the anti-human Fc secondary to detect ligand binding.

[0828] Selected variant CD80 IgV domains were further formatted as fusion proteins and tested for binding and functional activity as described below.

### Example 4

### Reformatting Selection Outputs as Fc-Fusions and in Various Immunomodulatory Protein Types

[0829] Example 4 describes reformatting of selection outputs identified in Example 3 as immunomodulatory proteins containing an affinity modified (variant) immunoglobulin-like V-type (IgV) domain of CD80 fused to an Fc molecule (variant IgV domain-Fc fusion molecules).

[0830] Output cell pools from final flow cytometric CD80 sorts were grown to terminal density in SCD-Leu medium. Plasmid DNA from each output was isolated using a yeast plasmid DNA isolation kit (Zymoresearch, USA). For Fc fusions, PCR primers with added restriction sites suitable for cloning into the Fc fusion vector of choice were used to batch-amplify from the plasmid DNA preps the coding DNA for the mutant target IgV domains After restriction digestion, the PCR products were ligated into Fc fusion vector followed by heat shock transformation into E. coli strain XL1 Blue (Agilent, USA) or NEB5alpha (New England Biolabs) as directed by supplier. Alternatively, the outputs were PCR amplified with primers containing 40 bp overlap regions on either end with Fc fusion vector to carry out in vitro recombination using Gibson Assembly Mastermix (New England Biolabs), which was subsequently used in heat shock transformation into E. coli strain NEB5alpha. Exemplary of an Fc fusion vector is pFUSE-hIgG1-Fc2 (InvivoGen, USA).

[0831] Dilutions of transformation reactions were plated on LB-agar containing 100 μg/mL carbenicillin (Teknova, USA) to isolate single colonies for selection. Up to 96 colonies from each transformation were then grown in 96 well plates to saturation overnight at 37° C. in LB-carbenicillin broth (Teknova cat #L8112) and a small aliquot from each well was submitted for DNA sequencing of the IgV domain insert in order to identify the mutation(s) in all clones. Sample preparation for DNA sequencing was carried out using protocols provided by the service provider (Genewiz; South Plainfield, N.J.). After removal of sample for DNA sequencing, glycerol was then added to the remaining cultures for a final glycerol content of 25% and plates were stored at −20° C. for future use as master plates (see below). Alternatively, samples for DNA sequencing were generated by replica plating from grown liquid cultures onto solid agar plates using a disposable 96 well replicator (VWR, USA). These plates were incubated overnight to generate growth patches and the plates were submitted to Genewiz as specified by Genewiz.

[0832] After identification of clones of interest from analysis of Genewiz-generated DNA sequencing data, clones of interest were recovered from master plates and individually grown to density in liquid LB-broth containing 100 μg/mL carbenicillin (Teknova, USA) and cultures were then used for preparation of plasmid DNA of each clone using a standard kit such as the PureYield Plasmid Miniprep System (Promega) or the MidiPlus kit (Qiagen). Identification of clones of interest from Genewiz sequencing data generally involved the following steps. First, DNA sequence data files were downloaded from the Genewiz website. All sequences were then manually curated so that they start at the beginning of the IgV domain coding region. The curated sequences were then batch-translated using a suitable program available at the URL: www.ebi.ac.uk/Tools/st/emboss_transeq/. The translated sequences were then aligned using a suitable program available at the URL: multalin.toulouse.inra.fr/multalin/multalin.html. Alternatively, Genewiz sequenced were processed to generate alignments using Ugene software (http://ugene.net).

[0833] Clones of interest were then identified from alignments using the following criteria: 1) identical clone occurs at least two times in the alignment and 2) a mutation occurs at least two times in the alignment and preferably in distinct clones. Clones that meet at least one of these criteria were assumed to be clones that have been enriched by the sorting process due to improved binding.

[0834] To generate recombinant immunomodulatory proteins that are Fc fusion proteins containing an IgV domain of CD80 with at least one affinity-modified domain (e.g. variant CD80 IgV-Fc), the DNA encoding the variant was generated to encode a protein as follows: variant (mutant) CD80 IgV domain followed by a linker of three alanines (AAA) followed by an inert Fc lacking effector function. In some cases the inert Fc was an Fc containing the mutations C220S, R292C, N297G and V302C by EU numbering (corresponding to C5S, R77C, N82G and V87C with reference to wild-type human IgG1 Fc set forth in SEQ ID NO: 1502), such as set forth in set forth in SEQ ID NO: 1519. In some cases, the inert Fc was an Fc containing the mutations C220S, L234A, L235E and G237A by EU numbering, such as set forth in SEQ ID NO: 1518 or 1520. Alternatively, CD80 IgV domains were fused in a similar manner but with a linker containing the amino acids (GSGGGGS; SEQ ID NO: 1522) followed by an inert Fc lacking effector function, set forth in SEQ ID NO: 1520, or allotypes thereof. In some cases, CD80 IgV domains were fused in a similar manner but with a human IgG1 Fc capable of effector activity (effector). Since the construct does not include an antibody, light chains that can form a covalent bond with a cysteine, such an exemplary human IgG1 Fc (set forth in SEQ ID NO: 1517) contained a replacement of the cysteine residue to a serine residue at position 220 (C220S) by EU numbering (corresponding to position 5 (C5S) with reference to the wild-type or unmodified Fc set forth in SEQ ID NO: 1502).

### Example 5

### Expression and Purification of Fc-Fusions

[0835] Example 5 describes the high throughput expression and purification of Fc-fusion proteins containing variant IgV CD80 as described in the above Examples.

[0836] Recombinant variant Fc fusion proteins were produced from suspension-adapted human embryonic kidney (HEK) 293 cells using the Expi293 expression system (Invitrogen, USA). 4 μg of each plasmid DNA from the previous step was added to 200 μL Opti-MEM (Invitrogen, USA) at the same time as 10.8 μL ExpiFectamine was separately added to another 200 μL Opti-MEM. After 5 minutes, the 200 μL of plasmid DNA was mixed with the 200 μL of ExpiFectamine and was further incubated for an additional 20 minutes before adding this mixture to cells. Ten million Expi293 cells were dispensed into separate wells of a sterile 10 mL, conical bottom, deep 24-well growth plate (Thomson Instrument Company, USA) in a volume of 4 mL Expi293 media (Invitrogen, USA). Plates were shaken for 5 days at 120 RPM in a mammalian cell culture incubator set to 95% humidity and 8% CO₂. Following a 5-day incubation, cells were pelleted and culture supernatants were retained.

[0837] Proteins were purified from supernatants using a high throughput 96-well Filter Plate (Thomson Catalog number 931919), each well loaded with 60 μL of Mab SelectSure settled bead (GE Healthcare cat. no. 17543801). Protein was eluted with four consecutive 200 μl fractions of 50 mM Acetate pH 3.3. Each fraction's pH was adjusted to above pH 5.0 with 4 μL 2 M Tris pH 8.0. Fractions were pooled and quantitated using 280 nm absorbance measured by Nanodrop instrument (Thermo Fisher Scientific, USA), and protein purity was assessed by loading 5 μg of non-reduced protein on Mini-Protean TGX Stain-Free gels. Proteins were then visualized on a Bio Rad Chemi Doc XRS gel imager.

### Example 6

### Assessment of Binding of Affinity-Matured IgSF Domain-Containing Molecules

[0838] This Example describes Fc-fusion binding studies of purified proteins from the above Examples to cell-expressed CTLA-4, PD-L1, and CD28 counter structures to assess the specificity and affinity of CD80 domain variant immunomodulatory proteins. Full-length mammalian surface expression constructs for each of human CTLA-4, PD-L1, and CD28, were designed in pcDNA3.1 expression vector (Life Technologies) and sourced from Genscript, USA. Binding studies were carried out on transfected HEK293 cells generated to express the full-length mammalian surface ligands using the using the Expi293F transient transfection system (Life Technologies, USA). As a control, binding to mock (non-transfected) cells also was assessed. The number of cells needed for the experiment was determined, and the appropriate 30 mL scale of transfection was performed using the manufacturer's suggested protocol. For each CTLA-4, PD-L1, CD-28 or mock 30 mL transfection, 75 million Expi293F cells were incubated with 30 μg expression construct DNA and 1.5 mL diluted ExpiFectamine 293 reagent for 48 hours, at which point cells were harvested for staining.

[0839] For staining and analysis by flow cytometry, 100,000 cells of appropriate transient transfection or negative control (mock) were plated in 96-well round bottom plates. Cells were spun down and resuspended in staining buffer (PBS (phosphate buffered saline), 1% BSA (bovine serum albumin), and 0.1% sodium azide) for 20 minutes to block non-specific binding. Afterwards, cells were centrifuged and resuspended in staining buffer containing 200 nM to 91 pM of each candidate variant CD80 Fc, depending on the experiment of each candidate variant CD80 Fc protein in 50 μl. As controls, the binding activities of wild-type CD80-ECD-Fc (R&D Systems), wild-type CD80-ECD-Fc (inert), wild-type IgV-Fc (inert) and/or human IgG (Sigma) were also assessed. Primary staining was performed on ice for 45 minutes, before washing cells in staining buffer twice. PE-conjugated anti-human Fc (Jackson ImmunoResearch, USA) was diluted 1:150 in 50 μL staining buffer and added to cells and incubated another 30 minutes on ice. Secondary antibody was washed out twice, cells were fixed in 4% formaldehyde/PBS, and samples were analyzed on Intellicyt flow cytometer (Intellicyt Corp, USA). Mean Fluorescence Intensity (MFI) was calculated for each transfectant and mock transfected HEK293 with FlowJo Version 10 software (FlowJo LLC, USA).

[0840] Results for two binding studies for exemplary CD80 variants are shown in Tables E1 and E2. In the Tables. The exemplary amino acid substitutions are designated by amino acid position number corresponding to numbering of the respective reference unmodified ECD sequence. For example, the reference unmodified ECD sequence is the unmodified CD80 ECD sequence set forth in SEQ ID NO: 2. The amino acid position is indicated in the middle, with the corresponding unmodified (e.g., wild-type) amino acid listed before the number and the identified variant amino acid substitution listed after the number. The second column sets forth the SEQ ID NO identifier for the variant IgV for each variant IgV-Fc fusion molecule.

[0841] Also shown is the binding activity as measured by the Mean Fluorescence Intensity (MFI) value for the binding of each variant CD80 Fc-fusion molecule to cells engineered to express the indicated cognate counter structure ligand (i.e., CTLA-4, PD-L1, or CD28) and the ratio of the MFI of the variant CD80 IgV-Fc, compared to the binding of the corresponding unmodified CD80 IgV-Fc fusion molecule not containing the amino acid substitution(s), to the same cell-expressed counter structure ligand. The ratio of the binding of the variant CD80IgV-Fc to the CTLA-4 counter structure ligand compared to the binding of the variant CD80IgV-Fc to the CD28 counter structure ligand also is shown in the last column of the Tables.

[0842] As shown in Tables E1 and E2, the selections resulted in the identification of a number of CD80 IgV domain variants that were affinity-modified to exhibit increased binding for CTLA-4 and/or PD-L1 counter structure ligand(s). In addition, the results indicate that a number of variants were selected that exhibit reduced binding to CD28, including several CD80 IgV domain variants that exhibit increased binding to the CTLA-4 counter structure ligand compared to the CD28 counter structure ligand (Ratio of CTLA-4:CD28).

TABLE E1
Variant CD80 Binding to HEK293 Cells Transfected with CTLA4, CD28 or PD-L1

| | | CTLA4 | | CD28 | | PD-L1 | | Ratio |
|---|---|---|---|---|---|---|---|---|
| | SEQ | MFI at | Fold | MFI at | Fold | MFI at | Fold | of |
| | ID NO | 66.6 | change | 66.6 | change | 22.2 | change | CTLA |
| CD80 mutation(s) | (IgV) | nM | to WT | nM | to WT | nM | to WT | 4:CD28 |
| L70P | 151 | Not tested | | | | | | |
| I30F/L70P | 152 | Not tested | | | | | | |
| Q27H/T41S/A71D | 153 | 368176 | 2.3 | 25051 | 1.01 | 24181 | N/A | 14.7 |
| I30T/L70R | 154 | 2234 | 0.0 | 2596 | 0.10 | 5163 | N/A | 0.9 |
| T13R/C16R/L70Q/A71D | 155 | 197357 | 1.2 | 16082 | 0.65 | 9516 | N/A | 12.3 |
| T57I | 156 | 393810 | 2.4 | 23569 | 0.95 | 3375 | N/A | 16.7 |
| M43I/C82R | 157 | 3638 | 0.0 | 3078 | 0.12 | 7405 | N/A | 1.2 |
| V22L/M38V/M47I/A71D/ | 158 | 175235 | 1.1 | 3027 | 0.12 | 6144 | N/A | 57.9 |
| L85M | | | | | | | | |
| I30V/T57I/L70P/A71D/ | 159 | 116085 | 0.7 | 10129 | 0.41 | 5886 | N/A | 11.5 |
| A91T | | | | | | | | |
| V22I/L70M/A71D | 160 | 163825 | 1.0 | 22843 | 0.92 | 33404 | N/A | 7.2 |
| N55D/L70P/E77G | 161 | Not tested | | | | | | |
| T57A/I69T | 162 | Not tested | | | | | | |
| N55D/K86M | 163 | 3539 | 0.0 | 3119 | 0.13 | 5091 | N/A | 1.1 |
| L72P/T57I | 164 | 50176 | 0.3 | 3397 | 0.14 | 6023 | N/A | 14.8 |
| L70P/F92S | 165 | 4035 | 0.0 | 2948 | 0.12 | 6173 | N/A | 1.4 |
| T79P | 166 | 2005 | 0.0 | 2665 | 0.11 | 4412 | N/A | 0.8 |
| E35D/M47I/L65P/D90N | 167 | 4411 | 0.0 | 2526 | 0.10 | 4034 | N/A | 1.7 |
| L25S/E35D/M47I/D90N | 168 | 61265 | 0.4 | 4845 | 0.20 | 20902 | N/A | 12.6 |
| A71D | 170 | 220090 | 1.4 | 16785 | 0.68 | 29642 | N/A | 13.1 |
| E81K/A91S | 172 | 98467 | 0.6 | 3309 | 0.13 | 44557 | N/A | 29.8 |
| A12V/M47V/L70M | 173 | 81616 | 0.5 | 7400 | 0.30 | 31077 | N/A | 11.0 |
| K34E/T41A/L72V | 174 | 88982 | 0.6 | 3755 | 0.15 | 35293 | N/A | 23.7 |
| T41S/A71D/V84A | 175 | 103010 | 0.6 | 5573 | 0.22 | 83541 | N/A | 18.5 |
| E35D/A71D | 176 | 106069 | 0.7 | 18206 | 0.73 | 40151 | N/A | 5.8 |
| E35D/M47I | 177 | 353590 | 2.2 | 14350 | 0.58 | 149916 | N/A | 24.6 |
| K36R/G78A | 178 | 11937 | 0.1 | 2611 | 0.11 | 5715 | N/A | 4.6 |
| Q33E/T41A | 179 | 8292 | 0.1 | 2442 | 0.10 | 3958 | N/A | 3.4 |
| M47V/N48H | 180 | 207012 | 1.3 | 14623 | 0.59 | 145529 | N/A | 14.2 |
| M47L/V68A | 181 | 74238 | 0.5 | 13259 | 0.53 | 11223 | N/A | 5.6 |
| S44P/A71D | 182 | 8839 | 0.1 | 2744 | 0.11 | 6309 | N/A | 3.2 |
| Q27H/M43I/A71D/R73S | 183 | 136251 | 0.8 | 12391 | 0.50 | 8242 | N/A | 11.0 |
| E35D/I57I/L70Q/A71D | 185 | 121901 | 0.8 | 21284 | 0.86 | 2419 | N/A | 5.7 |
| M47I/E88D | 186 | 105192 | 0.7 | 7337 | 0.30 | 97695 | N/A | 14.3 |
| M42I/I61V/A71D | 187 | 54478 | 0.3 | 6074 | 0.24 | 4226 | N/A | 9.0 |
| P51A/A71D | 188 | 67256 | 0.4 | 4262 | 0.17 | 5532 | N/A | 15.8 |
| H18Y/M47I/T57I/A71G | 189 | 136455 | 0.8 | 20081 | 0.81 | 13749 | N/A | 6.8 |
| V20I/M47V/I57I/V84I | 190 | 183516 | 1.1 | 26922 | 1.08 | 3583 | N/A | 6.8 |
| WT CD80 ECD-Fc | 2 | 161423 | 1.0 | 24836 | 1.00 | Not | N/A | 6.5 |
| | | | | | | tested | | |
| Fc only | | 5962 | | 2592 | | 4740 | | |

TABLE E2
Variant CD80 Binding to HEK293 Cells Transfected with CTLA4, CD28 or PD-L1

| | | | | CD28 | | | | |
|---|---|---|---|---|---|---|---|---|
| | | CTLA4 | | MFI | | PD-L1 | | |
| | SEQ | MFI at | Fold | at | Fold | MFI at | Fold | Ratio |
| | ID NO | 66.6 | change | 66.6 | change | 22.2 | change | of |
| CD80 mutation(s) | (IgV) | nM | to WT | nM | to WT | nM | to WT | CTLA4:CD28 |
| V20I/M47V/A71D | 191 | 149937 | 7.23 | 15090 | 9.33 | 9710 | 5.48 | 9.9 |
| A71D/L72V/E95K | 192 | 140306 | 6.77 | 6314 | 3.90 | 8417 | 4.75 | 22.2 |
| V22L/E35G/A71D/L72P | 193 | 152588 | 7.36 | 8150 | 5.04 | 1403 | 0.79 | 18.7 |
| E35D/A71D | 194 | 150330 | 7.25 | 14982 | 9.26 | 13781 | 7.77 | 10.0 |
| E35D/I67L/A71D | 195 | 146087 | 7.04 | 11175 | 6.91 | 9354 | 5.28 | 13.1 |
| T13R/M42V/M47I/A71D | 197 | 108900 | 5.25 | 16713 | 10.33 | 1869 | 1.05 | 6.5 |
| E35D | 198 | 116494 | 5.62 | 3453 | 2.13 | 25492 | 14.38 | 33.7 |
| E35D/M47I/L70M | 199 | 116531 | 5.62 | 14395 | 8.90 | 49131 | 27.71 | 8.1 |
| E35D/A71D/L72V | 200 | 134252 | 6.47 | 11634 | 7.19 | 13125 | 7.40 | 11.5 |
| E35D/M43L/L70M | 201 | 102499 | 4.94 | 3112 | 1.92 | 40632 | 22.92 | 32.9 |
| A26P/E35D/M43I/L85Q/ | 202 | 83139 | 4.01 | 5406 | 3.34 | 9506 | 5.36 | 15.4 |
| E88D | | | | | | | | |
| E35D/D46V/L85Q | 203 | 85989 | 4.15 | 7510 | 4.64 | 38133 | 21.51 | 11.4 |
| Q27L/E35D/M47I/T57I/ | | | | | | | | |
| L70Q/E88D | 204 | 59793 | 2.88 | 14011 | 8.66 | 1050 | 0.59 | 4.3 |
| Q27H/E35G/A71D/L72P/ | 196 | 85117 | 4.10 | 10317 | 6.38 | 1452 | 0.82 | 8.3 |
| T791 | | | | | | | | |
| M47V/I69F/A71D/V831 | 205 | 76944 | 3.71 | 15906 | 9.83 | 3399 | 1.92 | 4.8 |
| E35D/T57A/A71D/L85Q | 206 | 85724 | 4.13 | 3383 | 2.09 | 1764 | 0.99 | 25.3 |
| H18Y/A26T/E35D/A71D/ | 207 | 70878 | 3.42 | 6487 | 4.01 | 8026 | 4.53 | 10.9 |
| L85Q | | | | | | | | |
| E35D/M47L | 208 | 82410 | 3.97 | 11508 | 7.11 | 58645 | 33.08 | 7.2 |
| E23D/M42V/M43I/I58V/ | 209 | 37331 | 1.80 | 10910 | 6.74 | 2251 | 1.27 | 3.4 |
| L70R | | | | | | | | |
| V68M/L70M/A71D/E95K | 210 | 56479 | 2.72 | 10541 | 6.51 | 38182 | 21.53 | 5.4 |
| N55I/T57I/I69F | 211 | 2855 | 0.14 | 1901 | 1.17 | 14759 | 8.32 | 1.5 |
| E35D/M43I/A71D | 212 | 63789 | 3.08 | 6369 | 3.94 | 27290 | 15.39 | 10.0 |
| T41S/T57I/L70R | 213 | 59844 | 2.89 | 4902 | 3.03 | 19527 | 11.01 | 12.2 |
| H18Y/A71D/L72P/E88V | 214 | 68391 | 3.30 | 8862 | 5.48 | 1085 | 0.61 | 7.7 |
| V20I/A71D | 215 | 60323 | 2.91 | 10500 | 6.49 | 3551 | 2.00 | 5.7 |
| E23G/A26S/E35D/T62N/ | 216 | 59025 | 2.85 | 5484 | 3.39 | 10662 | 6.01 | 10.8 |
| A71D/L72V/L85M | | | | | | | | |
| A12T/E24D/E35D/D46V/ | 217 | 63738 | 3.07 | 7411 | 4.58 | 1221 | 0.69 | 8.6 |
| I61V/L72P/E95V | | | | | | | | |
| V22L/E35D/M43L/A71G/ | 218 | 2970 | 0.14 | 1498 | 0.93 | 1851 | 1.04 | 2.0 |
| D76H | | | | | | | | |
| E35G/K54E/A71D/L72P | 219 | 71899 | 3.47 | 3697 | 2.29 | 1575 | 0.89 | 19.4 |
| L70Q/A71D | 220 | 45012 | 2.17 | 18615 | 11.50 | 1692 | 0.95 | 2.4 |
| A26E/E35D/M47L/L85Q | 221 | 40325 | 1.94 | 2266 | 1.40 | 55548 | 31.33 | 17.8 |
| D46E/A71D | 222 | 69674 | 3.36 | 16770 | 10.36 | 22777 | 12.85 | 4.2 |
| Y31H/E35D/T41S/V68L/ | | | | | | | | |
| K93R/R94W | 223 | 3379 | 0.16 | 2446 | 1.51 | 18863 | 10.64 | 1.4 |
| WT CD80 IgV-Fc (inert) | 150 | 20739 | 1.00 | 1618 | 1.00 | 1773 | 1.00 | 12.8 |
| WT CD80 ECD-Fc | 2 | 72506 | 3.50 | 3072 | 1.90 | 4418 | 2.49 | 23.6 |
| (inert) | | | | | | | | |

### Example 7

### Selection of Additional Variant CD80 IgV Domains and Assessment of Binding Activity

[0843] In order to refine affinity and functional potency of CD80 IgV variant interactions with counter structures CTLA-4, CD28 and PDL1, second and third generations (Gen) of random mutagenesis and selection were run using procedures substantially described in Examples 1-3. Briefly, yeast plasmid DNA was isolated from outgrown yeast post FACS selection and used as template for mutagenic PCR. To maximize diversity, both characterized individual variants and a pool of FACS selected variants were used as template. The resulting library was subjected to iterative rounds of FACS selection and outgrowth. To increase PDL1 affinity while maintaining CD28 affinity, multiple FASC sort progression paths were taken. The second-generation mutagenic library underwent four FACS selections alternating between CD28− and CTLA-4+ selections generating outputs that, when titrated against counter structures, were chosen to be reformatted into Fc vectors. The third-generation mutagenic library used the following FACS selection paths to yield yeast outputs that, when titrated against counter structures, were chosen to be reformatted into Fc vectors: 1. 50 nM PDL1+, 2a. 1 nM CTLA-4+, 2b. 20 nM CTLA-4−, 2a3. 10 nM PDL1+, 2b. 10 nM PDL1+, 2b34. 25 nM CD28+. Following selection of yeast expressing affinity modified variants of CD80, the selected variants were reformatted as Fc fusion for the generation of additional Fc-fusion proteins containing IgV CD80 variants. After sequence analysis, individual variants were chosen for protein production, binding and functional assay. Variants from generation 1 mutagenesis are shown in Table E1, generation 2 shown in Table E2, generation 3 shown in Tables E3 and E4.

[0844] Binding of selected immunomodulatory fusion proteins to cognate binding partners was assessed. To produce cells expressing the CD80 cognate binding partners, huCTLA4 and huPD-L1, full-length mammalian surface expression constructs were generated, incorporated into lentivirus and transduced into CHO cells. Cells were sorted in a Bio-Rad S3 Cell Sorter (Bio-Rad Corp., USA) to >98% purity. Jurkat/IL2 reporter cells, which endogenously express CD28, were used to detect binding to CD28.

[0845] For staining and analysis by flow cytometry, 100,000 cells of appropriate transfected cells were plated in 96-well round bottom plates. Cells were spun down and resuspended in staining buffer (phosphate buffered saline (PBS), 1% bovine serum albumin (BSA), and 0.1% sodium azide) for 20 minutes to block non-specific binding. Afterwards, cells were centrifuged and resuspended in staining buffer containing a six-point serial dilution (concentrations ranged from 100 nM to 41 pM) of each candidate variant CD80-Fc protein in 50 μl. Primary staining was performed on ice for 45 minutes, before washing cells in staining buffer twice. Phycoerythrin (PE)-conjugated anti-human Fc (Jackson ImmunoResearch, USA) was diluted 1:150, added to cells and incubated another 30 minutes on ice. Cells were then washed twice with 150 μL/well stain buffer, fixed in 2% formaldehyde/PBS, and analyzed on Intellicyt flow cytometer (Intellicyt Corp., USA). PE Mean Fluorescence Intensity (MFI) was calculated for each cell type with FlowJo Version 10 software (FlowJo LLC, USA).

[0846] Results for two binding studies for exemplary CD80 variants are shown in Tables E3 and E4. In the Tables, the exemplary amino acid substitutions are designated by amino acid position number corresponding to numbering of the respective reference unmodified IgV sequence. For example, the reference unmodified ECD sequence is the unmodified CD80 ECD sequence set forth in SEQ ID NO:2. The amino acid position is indicated in the middle, with the corresponding unmodified (e.g., wild-type) amino acid listed before the number and the identified variant amino acid substitution listed after the number. The second column sets forth the SEQ ID NO identifier for the variant IgV for each variant IgV-Fc fusion molecule.

[0847] Also shown is the binding activity as measured by the Mean Fluorescence Intensity (MFI) value for the binding of 33 nM of each variant CD80 Fc-fusion molecule to cells engineered to express the indicated cognate counter structure ligand (i.e., CTLA-4, PD-L1, or CD28) and the ratio of the MFI of the variant CD80 IgV-Fc, compared to the binding of the unmodified CD80-ECD-Fc fusion molecule (R&D Systems, USA) not containing the amino acid substitution(s), to the same cell-expressed counter structure ligand. The ratio of the binding of the variant CD80 IgV-Fc to the PD-L1 counter structure compared to the binding of the variant CD80 IgV-Fc to the CD28 counter structure also is shown in the last column of the Tables.

[0848] As shown, the selections resulted in the identification of several CD80 IgV domain variants that were affinity-modified to exhibit increased binding for PD-L and/or CD28 counter structures. Several variants also retained or exhibited increased binding to CTLA-4, while others exhibited decreased binding to CTLA-4. In addition, the results indicate that a number of variants were selected that exhibit reduced binding to CD28, including several CD80 IgV domain variants that exhibit increased binding to the PD-L1 counter structure ligand compared to the CD28 counter structure ligand (Ratio of PD-L1:CD28). Thus, the variants have unique profiles for binding cell-surface CTLA4, CD28, and PD-L1 as measured by flow cytometry.

TABLE E3
Variant CD80 Flow Binding to Jurkat Cells (CD28) and CHO cells stably expressing
CTLA4 or PD-L1

| | | CTLA4 | | CD28 | | PD-L1 | | Ratio |
|---|---|---|---|---|---|---|---|---|
| | SEQ | MFI at | Fold | MFI at | Fold | MFI at | Fold | of |
| | ID NO | 33.3 | change | 33.3 | change | 33.3 | change | PDL1: |
| CD80 mutation(s) | (IgV) | nM | to WT CD80 | nM | to WT | nM | to WT | CD28 |
| A26E/Q33R/E35D/M47L/ | 416 | 1275 | 0.01 | 275 | 0.04 | 75974 | 9.56 | 276 |
| L85Q/K86E | | | | | | | | |
| A26E/Q33R/E35D/M47L/ | 417 | 1280 | 0.01 | 264 | 0.03 | 81533 | 10.26 | 309 |
| L85Q | | | | | | | | |
| E35D/M47L/L85Q | 418 | 336179 | 1.88 | 646 | 0.08 | 33200 | 4.18 | 51 |
| A26E/Q33L/E35D/M47L/ | 419 | 1172 | 0.01 | 274 | 0.04 | 62680 | 7.89 | 229 |
| L85Q | | | | | | | | |
| A26E/Q33L/E35D/M47L | 420 | 1316 | 0.01 | 271 | 0.04 | 60903 | 7.67 | 225 |
| H18Y/A26E/Q33L/E35D/ | 421 | 2088 | 0.01 | 272 | 0.04 | 76591 | 9.64 | 282 |
| M47L/L85Q | | | | | | | | |
| Q33L/E35D/M47I | 422 | 15919 | 0.09 | 282 | 0.04 | 37353 | 4.70 | 132 |
| H18Y/Q33L/E35D/M47I | 423 | 5539 | 0.03 | 295 | 0.04 | 47793 | 6.02 | 162 |
| Q33L/E35D/D46E/M47I | 424 | 23328 | 0.13 | 281 | 0.04 | 42137 | 5.30 | 150 |
| Q33R/E35D/D46E/M47I | 425 | 3562 | 0.02 | 303 | 0.04 | 53345 | 6.72 | 176 |
| H18Y/E35D/M47L | 426 | 284445 | 1.59 | 5068 | 0.66 | 44161 | 5.56 | 9 |
| Q33L/E35D/M47V | 427 | 47648 | 0.27 | 281 | 0.04 | 47911 | 6.03 | 170 |
| Q33L/E35D/M47V/T79A | 428 | 28899 | 0.16 | 285 | 0.04 | 62078 | 7.82 | 218 |
| Q33L/E35D/T41S/M47V | 429 | 14515 | 0.08 | 287 | 0.04 | 43850 | 5.52 | 153 |
| Q33L/E35D/M47I/L85Q | 430 | 20548 | 0.11 | 287 | 0.04 | 63930 | 8.05 | 222 |
| Q33L/E35D/M47I/T62N/ | 431 | 1658 | 0.01 | 284 | 0.04 | 72578 | 9.14 | 256 |
| L85Q | | | | | | | | |
| Q33L/E35D/M47V/L85Q | 432 | 75368 | 0.42 | 268 | 0.04 | 47438 | 5.97 | 177 |
| A26E/E35D/M43T/M47L/ | 433 | 278021 | 1.56 | 260 | 0.03 | 68089 | 8.57 | 262 |
| L85Q/R94Q | | | | | | | | |
| Q33R/E35D/K37E/M47V/ | 434 | 22701 | 0.13 | 258 | 0.03 | 44438 | 5.59 | 172 |
| L85Q | | | | | | | | |
| V22A/E23D/Q33L/E35D/ | 435 | 3636 | 0.02 | 274 | 0.04 | 75513 | 9.51 | 275 |
| M47V | | | | | | | | |
| E24D/Q33L/E35D/M47V/ | 436 | 310964 | 1.74 | 3180 | 0.42 | 67066 | 8.44 | 21 |
| K54R/L85Q | | | | | | | | |
| S15P/Q33L/E35D/M47L/ | 437 | 22377 | 0.13 | 266 | 0.03 | 51558 | 6.49 | 194 |
| L85Q | | | | | | | | |
| E7D/E35D/M47I/L97Q | 438 | 270798 | 1.52 | 273 | 0.04 | 14643 | 1.84 | 54 |
| Q33L/E35D/T41S/M43I | 439 | 6388 | 0.04 | 433 | 0.06 | 44935 | 5.66 | 104 |
| E35D/M47I/K54R/L85E | 440 | 8665 | 0.05 | 285 | 0.04 | 36917 | 4.65 | 130 |
| Q33K/E35D/D46V/L85Q | 441 | 8507 | 0.05 | 257 | 0.03 | 26676 | 3.36 | 104 |
| Y31S/E35D/M47L/T79L/ | 442 | 1095 | 0.01 | 278 | 0.04 | 38909 | 4.90 | 140 |
| E88G | | | | | | | | |
| H18L/V22A/E35D/M47L/ | 443 | 373548 | 2.09 | 434 | 0.06 | 98110 | 12.35 | 226 |
| N48T/L85Q | | | | | | | | |
| Q27H/E35D/M47L/L85Q/ | 444 | 288596 | 1.61 | 282 | 0.04 | 36055 | 4.54 | 128 |
| R94Q/E95K | | | | | | | | |
| Q33K/E35D/M47V/K89E/ | 445 | 1752 | 0.01 | 276 | 0.04 | 39061 | 4.92 | 142 |
| K93R | | | | | | | | |
| E35D/M47I/E77A/L85Q/ | 446 | 247334 | 1.38 | 272 | 0.04 | 64521 | 8.12 | 238 |
| R94W | | | | | | | | |
| A26E/E35D/M43I/M47L/ | 447 | 2947 | 0.02 | 314 | 0.04 | 49440 | 6.22 | 157 |
| L85Q/K86E/R94W | | | | | | | | |
| Q27H/Q33L/E35D/M47V/ | 448 | 56061 | 0.31 | 269 | 0.04 | 14802 | 1.86 | 55 |
| N55D/L85Q/K89N | | | | | | | | |
| H18Y/V20A/Q33L/E35D/ | 449 | 2878 | 0.02 | 260 | 0.03 | 120517 | 15.17 | 463 |
| M47V/Y53F | | | | | | | | |
| V22A/E35D/V68E/A71D | 450 | 437038 | 2.45 | 13987 | 1.83 | 1350 | 0.17 | 0 |
| Q33L/E35D/M47L/A71G/ | 451 | 2107 | 0.01 | 366 | 0.05 | 28041 | 3.53 | 77 |
| F92S | | | | | | | | |
| V22A/R29H/E35D/D46E/ | 452 | 77423 | 0.43 | 323 | 0.04 | 25407 | 3.20 | 79 |
| M47I | | | | | | | | |
| Q33L/E35D/M43I/L85Q/ | 453 | 1083 | 0.01 | 272 | 0.04 | 29001 | 3.65 | 107 |
| R94W | | | | | | | | |
| H18Y/E35D/V68M/L97Q | 454 | 172538 | 0.97 | 299 | 0.04 | 121591 | 15.31 | 407 |
| Q33L/E35D/M47L/V68M/ | 455 | 3526 | 0.02 | 264 | 0.03 | 125741 | 15.83 | 476 |
| L85Q/E88D | | | | | | | | |
| Q33L/E35D/M43V/M47I/ | 456 | 13964 | 0.08 | 284 | 0.04 | 78029 | 9.82 | 275 |
| A71G | | | | | | | | |
| E35D/M47L/A71G/L97Q | 457 | 225591 | 1.26 | 300 | 0.04 | 65944 | 8.30 | 220 |
| E35D/M47V/A71G/L85M/ | 458 | 239089 | 1.34 | 339 | 0.04 | 61708 | 7.77 | 182 |
| L97Q | | | | | | | | |
| H18Y/Y31H/E35D/M47V/ | 459 | 3835 | 0.02 | 268 | 0.04 | 76364 | 9.61 | 285 |
| A71G/L85Q | | | | | | | | |
| E35D/D46E/M47V/L97Q | 460 | 305331 | 1.71 | 371 | 0.05 | 19484 | 2.45 | 52 |
| E35D/D46V/M47I/A71G/ | 461 | 287194 | 1.61 | 7543 | 0.99 | 45755 | 5.76 | 6 |
| F92V | | | | | | | | |
| E35D/M47V/T62A/A71G/ | 462 | 18113 | 0.10 | 305 | 0.04 | 77547 | 9.76 | 255 |
| V83A/Y87H/L97M | | | | | | | | |
| Q33L/E35D/N48K/L85Q/ | 463 | 1183 | 0.01 | 279 | 0.04 | 45185 | 5.69 | 162 |
| L97Q | | | | | | | | |
| WT CD80 ECD-Fc | 2 | 178708 | 1.00 | 7627 | 1.00 | 7943 | 1.00 | 1 |
| (R&D) | | | | | | | | |

TABLE E4
Variant CD80 Flow Binding to Jurkat Cells (CD28) and CHO cells stably expressing
CTLA4 or PD-L1

| | | CTLA4 | | CD28 | | PD-L1 | | Ratio |
|---|---|---|---|---|---|---|---|---|
| | SEQ | MFI at | Fold | MFI at | Fold | MFI at | Fold | of |
| | ID NO | 33.3 | change | 33.3 | change | 33.3 | change | PDL1: |
| CD80 mutation(s) | (IgV) | nM | to WT CD80 | nM | to WT CD80 | nM | to WT CD80 | CD28 |
| E35D/L85Q/K93I/E95V/ | 464 | 246401 | 1.57 | 400 | 0.02 | 19880 | 1.67 | 50 |
| L97Q | | | | | | | | |
| E35D/M47V/N48KN68M/ | 465 | 807 | 0.01 | 11736 | 0.65 | 89775 | 7.56 | 8 |
| K89N | | | | | | | | |
| Q33L/E35D/M47I/N48D/ | 466 | 116798 | 0.74 | 644 | 0.04 | 31151 | 2.62 | 48 |
| A71G | | | | | | | | |
| R29H/E35D/M43V/M47I/ | 467 | 4694 | 0.03 | 336 | 0.02 | 1590 | 0.13 | 5 |
| I49V | | | | | | | | |
| Q27H/E35D/M47I/L85Q/D90G | 468 | 257734 | 1.64 | 3513 | 0.19 | 30667 | 2.58 | 9 |
| E35D/M47I/L85Q/D90G | 469 | 247703 | 1.57 | 4095 | 0.23 | 35710 | 3.01 | 9 |
| E35D/M47I/T62S/L85Q | 470 | 300845 | 1.91 | 1758 | 0.10 | 44975 | 3.79 | 26 |
| A26E/E35D/M47L/A71G | 471 | 341248 | 2.17 | 2161 | 0.12 | 53352 | 4.49 | 25 |
| E35D/M47I/Y87Q/K89E | 472 | 110177 | 0.70 | 15452 | 0.86 | 29803 | 2.51 | 2 |
| V22A/E35D/M47I/Y87N | 473 | 245711 | 1.56 | 15299 | 0.85 | 35251 | 2.97 | 2 |
| H18Y/A26E/E35D/M47L/ | 474 | 230588 | 1.47 | 3540 | 0.20 | 52390 | 4.41 | 15 |
| L85Q/D90G | | | | | | | | |
| E35D/M47L/A71G/L85Q | 475 | 156254 | 0.99 | 1436 | 0.08 | 50474 | 4.25 | 35 |
| E35D/M47V/A71G/E88D | 476 | 211831 | 1.35 | 6237 | 0.35 | 37146 | 3.13 | 6 |
| E35D/A71G | 477 | 184204 | 1.17 | 4299 | 0.24 | 34149 | 2.88 | 8 |
| E35D/M47V/A71G | 478 | 226532 | 1.44 | 6360 | 0.35 | 36216 | 3.05 | 6 |
| I30V/E35D/M47V/A71G/ | 479 | 204756 | 1.30 | 5779 | 0.32 | 43877 | 3.70 | 8 |
| A91V | | | | | | | | |
| V22D/E35D/M47L/L85Q | 481 | 256426 | 1.63 | 542 | 0.03 | 34908 | 2.94 | 64 |
| H18Y/E35D/N48K | 482 | 260795 | 1.66 | 4189 | 0.23 | 45849 | 3.86 | 11 |
| E35D/T41S/M47V/A71G/ | 483 | 251238 | 1.60 | 5314 | 0.29 | 45436 | 3.83 | 9 |
| K89N | | | | | | | | |
| E35D/M47V/N48I/L85Q | 484 | 281417 | 1.79 | 692 | 0.04 | 35491 | 2.99 | 51 |
| E35D/D46E/M47V/A71D/ | 485 | 274661 | 1.75 | 6169 | 0.34 | 32371 | 2.73 | 5 |
| D90G | | | | | | | | |
| E35D/D46E/M47V/A71D | 486 | 174016 | 1.11 | 5949 | 0.33 | 549 | 0.05 | 0 |
| E35D/T41S/M43I/A71G/ | 487 | 208017 | 1.32 | 9249 | 0.51 | 56172 | 4.73 | 6 |
| D90G | | | | | | | | |
| E35D/T41S/M43I/M47V/ | 488 | 243502 | 1.55 | 2845 | 0.16 | 44419 | 3.74 | 16 |
| A71G | | | | | | | | |
| E35D/T41S/M43I/M47L/ | 489 | 209034 | 1.33 | 3104 | 0.17 | 59613 | 5.02 | 19 |
| A71G | | | | | | | | |
| H18Y/V22A/E35D/M47V/ | 490 | 219782 | 1.40 | 4214 | 0.23 | 87702 | 7.39 | 21 |
| T62S/A71G | | | | | | | | |
| H18Y/A26E/E35D/M47L/ | 491 | 253787 | 1.61 | 14934 | 0.83 | 170935 | 14.40 | 11 |
| V68M/A71G/D90G | | | | | | | | |
| E35D/K37E/M47V/N48D/ | 492 | 243506 | 1.55 | 1589 | 0.09 | 26542 | 2.24 | 17 |
| L85Q/D90N | | | | | | | | |
| Q27H/E35D/D46V/M47L/ | 493 | 157358 | 1.00 | 10412 | 0.58 | 60139 | 5.07 | 6 |
| A71G | | | | | | | | |
| V22L/Q27H/E35D/M47I/ | 494 | 151600 | 0.96 | 7269 | 0.40 | 43797 | 3.69 | 6 |
| A71G | | | | | | | | |
| E35D/D46V/M47LN68M/ | 495 | 224734 | 1.43 | 5027 | 0.28 | 137368 | 11.57 | 27 |
| L85Q/E88D | | | | | | | | |
| E35D/T41S/M43V/M47I/ | 496 | 249456 | 1.59 | 2698 | 0.15 | 12978 | 1.09 | 5 |
| L70M/A71G | | | | | | | | |
| E35D/D46E/M47V/N63D/ | 497 | 274320 | 1.74 | 1331 | 0.07 | 69780 | 5.88 | 52 |
| L85Q | | | | | | | | |
| E35D/M47V/T62A/A71D/ | 498 | 225737 | 1.44 | 12030 | 0.67 | 693 | 0.06 | 0 |
| K93E | | | | | | | | |
| E35D/D46E/M47V/V68M/ | 499 | 273157 | 1.74 | 27080 | 1.50 | 71903 | 6.06 | 3 |
| D90G/K93E | | | | | | | | |
| E35D/M43I/M47V/K89N | 500 | 278391 | 1.77 | 6752 | 0.37 | 19250 | 1.62 | 3 |
| E35D/M47L/A71G/L85M/ | 501 | 215998 | 1.37 | 2459 | 0.14 | 46684 | 3.93 | 19 |
| F92Y | | | | | | | | |
| E35D/M42V/M47V/E52D/ | 502 | 225986 | 1.44 | 1291 | 0.07 | 11897 | 1.00 | 9 |
| L85Q | | | | | | | | |
| V22D/E35D/M47L/L70M/ | 503 | 127835 | 0.81 | 527 | 0.03 | 17670 | 1.49 | 34 |
| L97Q | | | | | | | | |
| E35D/T41S/M47V/L97Q | 504 | 262204 | 1.67 | 290 | 0.02 | 13591 | 1.14 | 47 |
| E35D/Y53H/A71G/D90G/ | 505 | 182701 | 1.16 | 1547 | 0.09 | 57455 | 4.84 | 37 |
| L97R | | | | | | | | |
| E35D/A71D/L72V/R73H/ | 506 | 186582 | 1.19 | 3365 | 0.19 | 503 | 0.04 | 0 |
| E81K | | | | | | | | |
| Q33L/E35D/M43I/Y53F/ | 507 | 3985 | 0.03 | 1024 | 0.06 | 72065 | 6.07 | 70 |
| T62S/L85Q | | | | | | | | |
| E35D/M38T/D46E/M47V/ | 508 | 175387 | 1.11 | 587 | 0.03 | 19393 | 1.63 | 33 |
| N48S | | | | | | | | |
| Q33R/E35D/M47V/N48K/ | 509 | 2680 | 0.02 | 265 | 0.01 | 21425 | 1.80 | 81 |
| L85M/F92L | | | | | | | | |
| E35D/M38I/M43V/M47V/ | 510 | 203938 | 1.30 | 285 | 0.02 | 21795 | 1.84 | 76 |
| N48R/L85Q | | | | | | | | |
| I28Y/Q33H/E35D/D46V/ | 511 | 156810 | 1.00 | 298 | 0.02 | 46038 | 3.88 | 154 |
| M47I/A71G | | | | | | | | |
| WT CD80 ECD-Fc | 2 | 157306 | 1.00 | 18035 | 1.00 | 11871 | 1.00 | 1 |
| (R&D) | | | | | | | | |

[0849] To further compare binding, various concentrations of exemplary variant CD80 IgV-Fc molecules were assessed and compared to wild-type CD80 IgV-Fc for binding to cell surface expressed PD-L1, CD28 and CTLA-4. The exemplary tested variant CD80 IgV-Fc included: E35D/D46V/M47L/V68M/L85Q/E88D (SEQ ID NO: 495), H18Y/A26E/E35D/M47L/V68M/A71G/D90G (SEQ ID NO: 491), H18Y/V22A/E35D/M47V/T62S/A71G (SEQ ID NO: 490), and E35D/M47V/N48K/V68M/K89N (SEQ ID NO: 465). Binding to CD28 was assessed using Jurkat/IL2 reporter cells expressing CD28 and binding to CTLA-4 and PD-L1 was assessed using CHO cells stably transfected to express huCTLA-4 or huPD-L1 as described above. Indicated transfectants or cell lines were plated and stained with titrated amounts of CD80 vIgD-Fc or wild-type CD80 IgV-Fc. Bound protein was detected with fluorochrome conjugated anti-huFc and Mean Fluorescence Intensity (MFI) measured by flow cytometry. As shown in FIG. 4, some tested CD80 vIgD-Fc bound human PD-L1, human CTLA-4, and human CD28 with higher affinity than wild-type CD80.

### Example 8

### Assessment of Bioactivity of Affinity-Matured CD80 IgSF Domain-Containing Molecules Using a Jurkat/IL2 Reporter Assay

[0850] This Example describes a Jurkat/IL2 reporter assay to assess bioactivity of CD80 domain variant immunomodulatory proteins for blockade of CD28 costimulation.

[0851] The day before the assay, the assay plate was prepared. To prepare the assay plate, 10 nM anti-CD3 antibody (clone OKT3; BioLegend, catalog no. 317315) and 20 nM CD86-Fc (R&D Systems, catalog no. 141-B2) in PBS were aliquoted at 100 μL/well into a white, flat-bottom 96-well plate (Costar). The plate was incubated overnight at 4° C. to allow the antibody and CD86-Fc protein to adhere to the surface of the plate. The next day, the wells of the assay plate were washed twice with 150 μL PBS prior to the assay.

[0852] The day of the assay, 60 μL exemplary variant CD80 IgV-Fc fusion molecules and control, wildtype CD80 IgV-Fc or wildtype CD80 (ECD)-Fc, molecules, or negative control Fc alone, were diluted to a concentration of 40 nM in assay buffer (RPMI1640+5% fetal bovine serum (FBS)), or buffer alone, and were added to the wells of a fresh 96-well polypropylene plate. Jurkat effector cells expressing IL-2-luciferase reporter were counted and resuspended in assay buffer to a concentration of 2×10⁶ cells/mL. 60 μL of the Jurkat cell suspension were then added to the wells containing the CD80-Fc fusion molecules or controls. The cells and CD80 proteins were incubated at room temperature for 15 minutes and then 100 μL of the cell/CD80 protein mixture were transferred/well of the prepared anti-CD3/CD86-Fc assay plate.

[0853] The assay plate was briefly spun down (10 seconds at 1200 RPM) and incubated at 37° C. for 5 hours. After the 5 hour incubation, the plate was removed and equilibrated to room temperature for 15 minutes. 100 μL of Bio-Glo (Promega) were added/well of the assay plate, which was then placed on an orbital shaker for 10 minutes. Luminescence was measured with a 1 second per well integration time using a BioTek Cytation 3 luminometer.

[0854] An average relative luminescence value was determined for each variant CD80 IgV Fc and a fold increase in IL-2 reporter signal was calculated for each variant compared to wildtype CD80 IgV-Fc protein. The results are provided in Table E5 below.

[0855] As shown in Table E5, co-culturing many of the exemplary variant CD80 IgV-Fc molecules with Jurkat effector cells expressing IL-2-luciferase reporter, resulted in decreased CD28 costimulation (i.e., blockade) compared to buffer only or the Fc-only negative control. Several of the variant CD80 IgV-Fc molecules appeared to increase the CD28 costimulatory signal compared to the wild-type CD80 IgV-Fc molecule suggesting possible agonistic activity.

TABLE E5
Jurkat/IL2 Reporter Assay: Blockade of
CD28 Costimulation

| | | Average | |
|---|---|---|---|
| | | Relative | Fold increase |
| CD80 Mutation(s) | SEQ ID NO (IgV) | Luminescence Units | in IL2 reporter signal |
| Q27H/T41S/A71D | 153 | 1301 | 0.32 |
| I30T/L70R | 154 | 3236 | 0.79 |
| T13R/C16R/L70Q/A71D | 155 | 3204 | 0.78 |
| T57I | 156 | 1463 | 0.36 |
| M43I/C82R | 157 | 1326 | 0.32 |
| V22L/M38V/M47T/A71D/L85M | 158 | 1770 | 0.43 |
| I30V/T57I/L70P/A71D/A91T | 159 | 1731 | 0.42 |
| V22I/L70M/A71D | 160 | 253 | 0.06 |
| N55D/K86M | 163 | 4277 | 1.04 |
| L72P/I79I | 164 | 4157 | 1.01 |
| L70P/F92S | 165 | 5035 | 1.22 |
| T79P | 166 | 4397 | 1.07 |
| E35D/M47I/L65P/D90N | 167 | 2377 | 0.58 |
| L25S/E35D/M47I/D90N | 168 | 2567 | 0.62 |
| A71D | 170 | 999 | 0.24 |
| E81K/A91S | 172 | 4038 | 0.98 |
| A12V/M47V/L70M | 173 | 4999 | 1.22 |
| K34E/T41A/L72V | 174 | 4225 | 1.03 |
| T41S/A71D/V84A | 175 | 2685 | 0.65 |
| E35D/A71D | 176 | 1461 | 0.36 |
| E35D/M47I | 177 | 1444 | 0.35 |
| K36R/G78A | 178 | 2597 | 0.63 |
| Q33E/T41A | 179 | 4220 | 1.03 |
| M47V/N48H | 180 | 2656 | 0.65 |
| M47L/V68A | 181 | 5445 | 1.32 |
| S44P/A71D | 182 | 2848 | 0.69 |
| Q27H/M43I/A71D/R73S | 183 | 1891 | 0.46 |
| E35D/T57I/L70Q/A71D | 185 | 280 | 0.07 |
| M47I/E88D | 186 | 2178 | 0.53 |
| M42I/I61V/A71D | 187 | 2549 | 0.62 |
| P51A/A71D | 188 | 4690 | 1.14 |
| H18Y/M47I/T57I/A71G | 189 | 924 | 0.22 |
| V20I/M47V/T57I/V84I | 190 | 1870 | 0.45 |
| V20I/M47V/A71D | 191 | 360 | 0.09 |
| A71D/L72V/E95K | 192 | 2939 | 0.71 |
| V22L/E35G/A71D/L72P | 193 | 2334 | 0.57 |
| E35D/A71D | 194 | 812 | 0.20 |
| E35D/I67L/A71D | 195 | 1223 | 0.30 |
| T13R/M42V/M47I/A71D | 197 | 759 | 0.18 |
| E35D | 198 | 1981 | 0.48 |
| E35D/M47I/L70M | 199 | 1077 | 0.26 |
| E35D/A7I/L72V | 200 | 1152 | 0.28 |
| E35D/M43L/L70M | 201 | 3640 | 0.88 |
| A26P/E35D/M43I/L85Q/E88D | 202 | 4078 | 0.99 |
| E35D/D46V/L85Q | 203 | 3230 | 0.79 |
| Q27L/E35D/M47I/T57I/L70Q/E88D | 204 | 1180 | 0.29 |
| Q27H/E35G/A71D/L72P/T791 | 196 | 2000 | 0.49 |
| M47V/169F/A71D/V831 | 205 | 290 | 0.07 |
| E35D/T57A/A71D/L85Q | 206 | 3213 | 0.78 |
| H18Y/A26T/E35D/A71D/L85Q | 207 | 2773 | 0.67 |
| E35D/M47L | 208 | 1110 | 0.27 |
| E23D/M42V/M43I/I58V/L70R | 209 | 4460 | 1.08 |
| V68M/L70M/A71D/E95K | 210 | 2067 | 0.50 |
| N55I/T57I/I69F | 211 | 1915 | 0.47 |
| E35D/M43I/A71D | 212 | 3019 | 0.73 |
| T41S/T57I/L70R | 213 | 3641 | 0.89 |
| H18Y/A71D/L72P/E88V | 214 | 1354 | 0.33 |
| V20I/A71D | 215 | 2165 | 0.53 |
| E23G/A26S/E35D/T62N/A71D/ | 216 | 2067 | 0.50 |
| L72V/L85M | | | |
| A12T/E24D/E35D/D46V/161V/ | 217 | 2408 | 0.59 |
| L72P/E95V | | | |
| V22L/E35D/M43L/A71G/D76H | 218 | 2004 | 0.49 |
| E35G/K54E/A71D/L72P | 219 | 3618 | 0.88 |
| L70Q/A71D | 220 | 1036 | 0.25 |
| A26E/E35D/M47L/L85Q | 221 | 4111 | 1.00 |
| D46E/A71D | 222 | 490 | 0.12 |
| Y31H/E35D/T41S/V68L/K93R/R94W | 223 | 3678 | 0.89 |
| WT CD80 IgV-Fc | 150 | 4113 | 1.00 |
| WT CD80 ECD-Fc | 2 | 3816 | 0.93 |
| Fc only Control | — | 4107 | 1.00 |
| Buffer Only | — | 4173.25 | 1.01 |

### Example 9

### Assessment of Bioactivity of Affinity-Matured CD80 IgSF Domain-Containing Molecules in the Presence and Absence of PD-L1 Using a Jurkat/IL2 Reporter Assay

[0856] This Example describes a Jurkat/IL2 reporter assay to assess the capacity of CD80 domain variant immunomodulatory proteins fused to either an inert Fc molecule (e.g. SEQ ID NO: 1520, or allotypes thereof) or an Fc molecule capable of mediating effector activity (SEQ ID NO: 1517) to modulate CD28 costimulation signal in the presence or absence of PD-L1-expressing antigen presenting cells.

[0857] A. PD-L1-Dependent CD28 Costimulation

[0858] Jurkat effector cells expressing an IL-2-luciferase reporter (purchased from Promega Corp., USA) were suspended at 2×10⁶ cells/mL in Jurkat Assay buffer (RPMI1640+5% FBS). Jurkat cells were then plated at 50 μL/well for a total of 100,000 cells per well.

[0859] To each well, 25 μL of test protein was added to the Jurkat cells. Test proteins included variant CD80 IgV-Fc (inert) fusion molecules or full CD80-ECD-Fc (R&D Systems, USA) or wild type CD80-IgV-Fc (inert). All proteins were added at: 200 nM, 66.7 nM, and 22.2 nM (no PD-L1) or 200 nM, 66.7 nM, 22.2 nM, 7.4 nM, and 2.5 nM (+PD-L1). The Jurkat cells with test or control proteins were incubated for 15 minutes at room temperature. CHO-derived artificial antigen presenting cells (aAPC) displaying transduced cell surface anti-CD3 single chain Fv (OKT3) (i.e., no PD-L1), or OKT3 and PD-L1 (i.e., +PD-L1), were brought to 0.8×10⁶ cells/mL, and 25 μL of cells were added to each well, bringing the final volume of each well to 100 μL. Each well had a final ratio of 5:1 Jurkat:CHO cells and a test protein concentration of 50, 16.7 or 5.6 nM (no PD-L1), or 50, 16.7, 5.6, 1.9, and 0.6 nM (+PD-L1). Jurkat cells and CHO cells were incubated for 5 hours at 37 degrees Celsius in a humidified 5% CO₂ incubation chamber. Plates were then removed from the incubator and acclimated to room temperature for 15 minutes. 100 μL of a cell lysis and luciferase substrate solution (BioGlo luciferase reagent, Promega) were added to each well and the plates were incubated on an orbital shaker for 10 minutes. Luminescence was measured with a 1 second per well integration time using a BioTek Cytation luminometer, and a relative luminescence value (RLU) was determined for each test sample. The results are provided in Table E6.

[0860] In the absence of PD-L1 on the aAPC, little to no co-stimulatory signal was observed consistent with the observation that variant CD80 molecules fused to an inert Fc were not able to induce a costimulatory signal via CD28. In the presence of PD-L1, however, several of the variant CD80-IgV-Fc (inert) molecules tested exhibited concentration dependent CD28 costimulation that was correlated with the CD28 and/or PD-L1 binding affinity of the variant molecules. This result indicates that variant CD80 molecules with increased affinity to PD-L1 are able to mediate PD-L1-dependent costimulation of CD28.

TABLE E6
PD-L1-Dependent CD28 Costimulation

| | | No PD-L1 | | | +PD-L1 | | | | |
|---|---|---|---|---|---|---|---|---|---|
| | SEQ ID | 5.6 | | 50 | 0.6 | | 5.6 | 16.7 | 50 |
| CD80 Mutation(s) | NO (IgV) | nM | 16.7 nM | nM | nM | 1.9 nM | nM | nM | nM |
| E35D/M47I | 177 | 637 | 710 | 894 | 1047 | 1732 | 2794 | 3672 | 3778 |
| A71D/L72V/E95K | 192 | 466 | 547 | 644 | 524 | 530 | 617 | 641 | 755 |
| E35D | 198 | 412 | 480 | 448 | 456 | 465 | 625 | 995 | 1606 |
| E35D/M47I/L70M | 199 | 549 | 544 | 600 | 1004 | 1640 | 2348 | 2629 | 2629 |
| E35D/M43L/L70M | 201 | 396 | 439 | 515 | 479 | 525 | 683 | 1066 | 1809 |
| E35D/D46V/L85Q | 203 | 511 | 554 | 720 | 611 | 1001 | 1486 | 1814 | 2224 |
| H18Y/A26I/E35D/ | 207 | 638 | 660 | 926 | 628 | 621 | 795 | 974 | 1156 |
| A71D/L85Q | | | | | | | | | |
| E35D/M47L | 208 | 633 | 731 | 817 | 1041 | 1730 | 2580 | 3069 | 2906 |
| E23G/A26S/E35D/ | 216 | 566 | 560 | 606 | 524 | 604 | 659 | 689 | 695 |
| T62N/A71D/ | | | | | | | | | |
| L72V/L85M | | | | | | | | | |
| E35G/K54E/A71D/L72P | 219 | 417 | 475 | 440 | 529 | 489 | 554 | 504 | 476 |
| A26E/E35D/M47L/L85Q | 221 | 458 | 415 | 432 | 509 | 618 | 886 | 1385 | 1998 |
| WT CD80 IgV-Fc (inert) | 150 | 450 | 444 | 479 | 458 | 486 | 511 | 523 | 483 |
| WT CD80 ECD-Fc (inert) | 2 | 436 | 412 | 420 | 518 | 474 | 505 | 462 | 449 |
| Fc only Control | — | 419 | 406 | 395 | 501 | 457 | 438 | 451 | 440 |

[0861] In a further experiment, other variant CD80 IgV-Fc (inert) fusion proteins were tested for CD28 stimulation in the absence of aAPCs+/−PD-L as described above, except the final concentrations of each test protein were 50 nM and 5 nM. A relative luminescence value (RLU) was determined for each test sample and a fold increase (or decrease) in EL-2 reporter signal was calculated for each variant CD80-IgV molecule and compared to wildtype CD80-ECD-Fc (inert) and CD80-IgV-Fc (inert) proteins.

[0862] As shown in Tables E7 and E8, the luciferase activity of the Jurkat effector cells co-cultured with K562/OKT3/PD-L1 aAPC and 50 nM CD8N-IgV-Fc (inert) molecules was altered (increased or decreased) for several of the molecules tested. Simultaneous binding of PD-L1 on the aAPC and CD28 on the Jurkat cell resulted in increased CD28-costimulation and downstream EL-2 signal transduction. Fold increase (or decrease) in luminescence relative to wildtype CD80-IgV-Fc (inert) is also shown. In the Table, the first column sets forth the mutation(s), and the second column sets forth the SEQ ID NO identifier for each CD80-IgV of a CD80-IgV Fc (inert) variant tested.

TABLE E7
Jurkat/IL2 + K562/OKT3/PD-L1 Reporter Assay:
Relative Luciferase Units (RLU)

| | | CD80-Fc | Fold Increase |
|---|---|---|---|
| CD80 Mutation(s) | SEQ ID NO (IgV) | Conc. 50 nM | over WT CD80-IgV-Fc |
| A26E/Q33R/E35D/M47L/L85Q/K86E | 416 | 569 | 1.0 |
| A26E/Q33R/E35D/M47L/L85Q | 417 | 500 | 0.9 |
| E35D/M47L/L85Q | 418 | 2852 | 5.0 |
| A26E/Q33L/E35D/M47L/L85Q | 419 | 416 | 0.7 |
| A26E/Q33L/E35D/M47L | 420 | 476 | 0.8 |
| H18Y/A26E/Q33L/E35D/M47L/L85Q | 421 | 408 | 0.7 |
| Q33L/E35D/M47I | 422 | 423 | 0.7 |
| H18Y/Q33L/E35D/M47I | 423 | 486 | 0.9 |
| Q33L/E35D/D46E/M47I | 424 | 554 | 1.0 |
| Q33R/E35D/D46E/M47I | 425 | 522 | 0.9 |
| H18Y/E35D/M47L | 426 | 2976 | 5.3 |
| Q33L/E35D/M47V | 427 | 393 | 0.7 |
| Q33L/E35D/M47V/T79A | 428 | 527 | 0.9 |
| Q33L/E35D/T41S/M47V | 429 | 481 | 0.8 |
| Q33L/E35D/M47I/L85Q | 430 | 432 | 0.8 |
| Q33L/E35D/M47I/T62N/L85Q | 431 | 463 | 0.8 |
| Q33L/E35D/M47V/L85Q | 432 | 556 | 1.0 |
| A26E/E35D/M43T/M47L/L85Q/R94Q | 433 | 526 | 0.9 |
| Q33R/E35D/K37E/M47V/L85Q | 434 | 464 | 0.8 |
| V22A/E23D/Q33L/E35D/M47V | 435 | 390 | 0.7 |
| E24D/Q33L/E35D/M47V/K54R/L85Q | 436 | 3235 | 5.7 |
| S15P/Q33L/E35D/M47L/L85Q | 437 | 468 | 0.8 |
| E7D/E35D/M47I/L97Q | 438 | 1243 | 2.2 |
| Q33L/E35D/T41S/M43I | 439 | 533 | 0.9 |
| E35D/M47I/K54R/L85E | 440 | 602 | 1.1 |
| Q33K/E35D/D46V/L85Q | 441 | 504 | 0.9 |
| Y31S/E35D/M47L/T79L/E88G | 442 | 496 | 0.9 |
| H18L/V22A/E35D/M47L/N48T/L85Q | 443 | 2652 | 4.7 |
| Q27H/E35D/M47L/L85Q/R94Q/E95K | 444 | 513 | 0.9 |
| Q33K/E35D/M47V/K89E/K93R | 445 | 415 | 0.7 |
| E35D/M47I/E77A/L85Q/R94W | 446 | 473 | 0.8 |
| A26E/E35D/M43I/M47L/L85Q/K86E/R94W | 447 | 498 | 0.9 |
| Q27H/Q33L/E35D/M47V/N55D/L85Q/K89N | 448 | 551 | 1.0 |
| H18Y/V20A/Q33L/E35D/M47V/Y53F | 449 | 566 | 1.0 |
| V22A/E35D/V68E/A71D | 450 | 538 | 1.0 |
| Q33L/E35D/M47L/A71G/F925 | 451 | 394 | 0.7 |
| V22A/R29H/E35D/D46E/M47I | 452 | 3314 | 5.9 |
| Q33L/E35D/M43I/L85Q/R94W | 453 | 553 | 1.0 |
| H18Y/E35DN68M/L97Q | 454 | 4336 | 7.7 |
| Q33L/E35D/M47L/V68M/L85Q/E88D | 455 | 572 | 1.0 |
| Q33L/E35D/M43V/M47I/A71G | 456 | 473 | 0.8 |
| E35D/M47L/A71G/L97Q | 457 | 2156 | 3.8 |
| E35D/M47V/A71G/L85M/L97Q | 458 | 576 | 1.0 |
| H18Y/Y31H/E35D/M47V/A71G/L85Q | 459 | 455 | 0.8 |
| E35D/D46E/M47V/L97Q | 460 | 1087 | 1.9 |
| E35D/D46V/M47I/A71G/F92V | 461 | 2254 | 4.0 |
| E35D/M47V/T62A/A71G/V83A/Y87H/L97M | 462 | 438 | 0.8 |
| Q33L/E35D/N48K/L85Q/L97Q | 463 | 358 | 0.6 |
| WT CD80-ECD-Fc (effector) | 2 | 3045 | 5.4 |
| WT CD80 | 150 | 566 | 1 |
| IgV-Fc (inert) | | | |

TABLE E8
Jurkat/IL2 + K562/OKT3/PD-L1 Reporter Assay:
Relative Luciferase Units (RLU)

| | | CD80-Fe | Fold Increase |
|---|---|---|---|
| CD80 Mutation(s) | SEQ ID NO (IgV) | Cone 50 nM | over WT CD80-IgV-Fe |
| E35D/L85Q/K93T/E95V/L97Q | 464 | 315 | 1.5 |
| E35D/M47V/N48K/V68M/K89N | 465 | 1439 | 7.0 |
| Q33L/E35D/M47I/N48D/A71G | 466 | 213 | 1.0 |
| R29H/E35D/M43V/M47I/I49V | 467 | 227 | 1.1 |
| Q27H/E35D/M47I/L85Q/D90G | 468 | 1313 | 6.4 |
| E35D/M47I/L85Q/D90G | 469 | 1438 | 7.0 |
| E35D/M47I/T62S/L85Q | 470 | 1571 | 7.6 |
| A26E/E35D/M47L/A71G | 471 | 1748 | 8.5 |
| E35D/M47I/Y87Q/K89E | 472 | 1581 | 7.7 |
| V22A/E35D/M47I/Y87N | 473 | 1388 | 6.7 |
| H18Y/A26E/E35D/M47L/L85Q/D90G | 474 | 1506 | 7.3 |
| E35D/M47L/A71G/L85Q | 475 | 1256 | 6.1 |
| E35D/M47V/A71G/E88D | 476 | 1216 | 5.9 |
| E35D/A71G | 477 | 1190 | 5.8 |
| E35D/M47V/A71G | 478 | 1190 | 5.8 |
| I30V/E35D/M47V/A71G/A91V | 479 | 1503 | 7.3 |
| V22D/E35D/M47L/L85Q | 481 | 1142 | 5.5 |
| H18Y/E35D/N48K | 482 | 1230 | 6.0 |
| E35D/T41S/M47V/A71G/K89N | 483 | 1023 | 5.0 |
| E35D/M47V/N48T/L85Q | 484 | 897 | 4.4 |
| E35D/D46E/M47V/A71D/D90G | 485 | 1042 | 5.1 |
| E35D/D46E/M47V/A71D | 486 | 683 | 3.3 |
| E35D/T41S/M43I/A71G/D90G | 487 | 1122 | 5.4 |
| E35D/T41S/M43I/M47V/A71G | 488 | 1273 | 6.2 |
| E35D/T41S/M43I/M47L/A71G | 489 | 1535 | 7.5 |
| H18Y/V22A/E35D/M47V/T62S/A71G | 490 | 1379 | 6.7 |
| H18Y/A26E/E35D/M47L/V68M/A71G/D90G | 491 | 1116 | 5.4 |
| E35D/K37E/M47V/N48D/L85Q/D90N | 492 | 851 | 4.1 |
| Q27H/E35D/D46V/M47L/A71G | 493 | 978 | 4.7 |
| V22L/Q27H/E35D/M47I/A71G | 494 | 1123 | 5.5 |
| E35D/D46V/M47L/V68M/L85Q/E88D | 495 | 1464 | 7.1 |
| E35D/T41S/M43V/M47I/L70M/A71G | 496 | 1672 | 8.1 |
| E35D/D46E/M47V/N63D/L85Q | 497 | 1381 | 6.7 |
| E35D/M47V/T62A/A71D/K93E | 498 | 1056 | 5.1 |
| E35D/D46E/M47V/V68M/D90G/K93E | 499 | 1261 | 6.1 |
| E35D/M43I/M47V/K89N | 500 | 1094 | 5.3 |
| E35D/M47L/A71G/L85M/F92Y | 501 | 1322 | 6.4 |
| E35D/M42V/M47V/E52D/L85Q | 502 | 1260 | 6.1 |
| V22D/E35D/M47L/L70M/L97Q | 503 | 1542 | 7.5 |
| E35D/T41S/M47V/L97Q | 504 | 594 | 2.9 |
| E35D/Y53H/A71G/D90G/L97R | 505 | 1723 | 8.4 |
| E35D/A71D/L72V/R73H/E81K | 506 | 282 | 1.4 |
| Q33L/E35D/M43I/Y53F/T62S/L85Q | 507 | 168 | 0.8 |
| E35D/M38T/D46E/M47V/N48S | 508 | 1315 | 6.4 |
| Q33R/E35D/M47V/N48K/L85M/F92L | 509 | 215 | 1.0 |
| E35D/M38T/M43V/M47V/N48R/L85Q | 510 | 680 | 3.3 |
| T28Y/Q33H/E35D/D46V/M47I/A71G | 511 | 580 | 2.8 |
| WT CD80 ECD-Fc (effector) | 2 | 1786 | 8.7 |
| WT CD80-IgV-Fc (inert) | 150 | 206 | 1.0 |

[0863] To further compare activity, various concentrations of exemplary variant CD80 IgV-Fc (inert) were assessed for induction of luciferase activity in Jurkat/IL2 reporter cells using the K562/OKT3/PDL1 aAPC cell line described above and activity was compared to wildtype CD80 IgV-Fc (inert). The exemplary variant CD80 IgV molecules that were tested contained E35D/M47V/N48K/V68M/K89N (SEQ ID NO: 465), H18Y/Y22A/E35D/M47V/T62S/A71G (SEQ ID NO: 490), H18Y/A26E/E35D/M47L/V68M/A71G/D90G (SEQ ID NO: 491), and E35D/D46V/M47L/V68M/L85Q/E88D (SEQ ID NO: 495). As shown in FIG. 5, the exemplary tested variant CD80 IgV domain-containing molecules induced PD-L1 dependent CD28 costimulation in a dose-dependent manner. No PD-L1 dependent CD28 costimulation was observed by wildtype CD80 IgV-Fc at any of the assessed concentrations.

[0864] B. Cytokine Production Following PD-L1-Dependent Costimulation

[0865] K562/OKT3/PDL1 aAPC cells described above were treated with mitomycin-c and co-cultured with primary human pan T cells in the presence of titrated increasing concentrations of CD80 IgV-Fc (inert) or wildtype CD80 IgV-Fc (inert). Exemplary variant CD80-Fcs tested contained E35D/M47V/N48K/V68M/K89N (SEQ ID NO: 465), H18Y/A26E/E35D/M47L/V68M/A71G/D90G (SEQ ID NO: 491), E35D/D46V/M47L/V68M/L85Q/E88D (SEQ ID NO: 495), E35D/D46E/M47V/V68M/D90G/K93E (SEQ ID NO: 499). As a further control, primary human pan T cells also were cultured with the exemplary anti-PD-L1 durvalumab or an Fc (inert) only control. Results, set forth in FIG. 6, showed that the tested variant CD80-IgV-Fc molecules resulted in IL-2 secretion in culture supernatants, consistent with an observation that PD-L1 dependent co-stimulation was induced by the tested exemplary variant CD80-IgV-Fc molecules. IL-2 production was not observed in T cell cultures when incubated with wildtype CD80-IgV Fc or other tested controls.

[0866] C. Fc-Dependent CD28 Costimulation +/−PD-L1

[0867] In a further experiment, CD28 costimulation was assessed for variant CD80-IgV-Fc fusion proteins, where the Fc was an IgG1 Fc (e.g. SEQ ID NO:1517) capable of mediating effector activity via binding to Fc receptors (FcR). The experiment was carried out as described in part A above, except CD32-expressing K562 cells stably transduced with OKT3 (K562/OKT3) or OKT3 and PD-L1 (K562/OKT3/PD-L1) were used instead of the CHO/OKT3 and CHO/OKT3/PD-L1 cells, and the results are depicted in Table E9.

TABLE E9
CD28 Costimulation via Fc Receptor or PD-L1 Dependent Cross-Linking

| | | K562/0KT3 aAPC | | | | | K562/0KT3/PD-L1 aAPC | | | | |
|---|---|---|---|---|---|---|---|---|---|---|---|
| | SEQ | FcR Dependent Cross-Linking | | | | | Combination of FcR and/or PD-L1 | | | | |
| | ID | (No PD-L1) | | | | | Dependent Cross-Linking | | | | |
| | NO | 0.6 | 1.9 | 5.6 | 16.7 | 50 | 0.6 | 1.9 | 5.6 | 16.7 | 50 |
| CD80 Mutation(s) | (IgV) | nM | nM | nM | nM | nM | nM | nM | nM | nM | nM |
| E35D/M47I | 177 | 1777 | 2133 | 3651 | 5792 | 7144 | 2832 | 3604 | 4702 | 5321 | 5704 |
| A71D/L72V/E95K | 192 | 1821 | 2588 | 4127 | 5553 | 7109 | 1060 | 1537 | 2517 | 3642 | 4031 |
| E35D | 198 | 1402 | 1328 | 1300 | 1318 | 1203 | 920 | 1113 | 1397 | 1765 | 2270 |
| E35D/M47I/L70M | 199 | 1609 | 2520 | 4231 | 5370 | 5780 | 2238 | 2689 | 3654 | 3907 | 3870 |
| E35D/M43L/L70M | 201 | 1349 | 1336 | 1404 | 1345 | 1573 | 1022 | 1250 | 1616 | 2046 | 2780 |
| E35D/D46V/L85Q | 203 | 1880 | 2721 | 4396 | 6023 | 7015 | 1418 | 2432 | 3306 | 3645 | 4126 |
| H18Y/A26I/E35D/ | 207 | 2081 | 2808 | 4550 | 6958 | 8747 | 1156 | 1825 | 3121 | 4329 | 5215 |
| A71D/L85Q | | | | | | | | | | | |
| E35D/M47L | 208 | 2119 | 3042 | 5615 | 7736 | 8685 | 2783 | 3846 | 4726 | 5406 | 5036 |
| E23G/A26S/E35D/T62N/ | 216 | 2022 | 3300 | 5052 | 7011 | 7855 | 1153 | 1949 | 3219 | 4042 | 4138 |
| A71D/L72V/L85M | | | | | | | | | | | |
| E35G/K54E/A71D/L72P | 219 | 1337 | 1367 | 1380 | 1430 | 1510 | 689 | 732 | 735 | 701 | 805 |
| A26E/E35D/M47L/L85Q | 221 | 1350 | 1382 | 1416 | 1371 | 1327 | 1228 | 1586 | 2004 | 2504 | 2640 |
| WT CD80 IgV-Fc | 150 | 1410 | 1349 | 1309 | 1208 | 1246 | 662 | 674 | 697 | 673 | 663 |
| WT CD80 ECD-Fc | 2 | 1344 | 1270 | 1481 | 1727 | 2202 | 692 | 705 | 847 | 875 | 1519 |
| (inert) | (ECD) | | | | | | | | | | |
| Fc only Control | 1520 | 1404 | 1390 | 1390 | 1370 | 1373 | 689 | 675 | 666 | 694 | 679 |

[0868] Some of the exemplary assessed variant CD80-IgV Fc (effector) immunomodulatory proteins, including E35D, E35D/M43L/L70M, and A26E/E35D/M47L/L85Q, did not effect CD28 costimulation when crosslinked by binding to the FcR. However, the results indicated that several exemplary assessed variants with an Fc capable of binding FcR (effector) could provide CD28 costimulation in trans with FcR crosslinking. Among these, some of the exemplary assessed CD80-IgV Fc (effector) immunomodulatory proteins, such as E35D/M47F, enhanced CD28 costimulation via crosslinking of both PD-L1 and FcR. In some cases, the results indicated enhanced CD28 costimulation by crosslinking of FcR and PD-L1 was more potent than crosslinking of PD-L1 alone.

### Example 10

### Generation of Additional Variant CD80 IgV Domains

[0869] A. Additional CD8 IgV Binding Domains and Binding Assessment

[0870] Additional CD80 variants were generated and expressed as Fc fusion proteins essentially as described in Examples 2-5. The variants were tested for binding, substantially as described in Example 7, and bioactivity, substantially described in Example 9. Results from the binding and activity studies are provided in Tables E10-E13.

[0871] 1. Binding Assessment

TABLE E10
Flow Binding to Jurkats (CD28) and CHO cells stably expressing CTLA4 or PD-L1

| | | CTLA4 | | CD28 | | PD-L1 | | Ratio |
|---|---|---|---|---|---|---|---|---|
| | SEQ | MFI at | Fold | MFI at | Fold | MFI at | Fold | of |
| | ID NO | 33.3 | change | 33.3 | change | 33.3 | change | PDL1: |
| CD80 mutation(s) | (IgV) | nM | to WT CD80 | nM | to WT CD80 | nM | to WT CD80 | CD28 |
| E35D/N48K/L72V | 934 | 32731 | 17.1 | 582 | 8.8 | 3031 | 43.1 | 5 |
| E35D/T41S/N48T | 935 | 30262 | 15.8 | 72.4 | 1.1 | 2191 | 31.2 | 30 |
| D46V/M47I/A71G | 936 | 28420 | 14.8 | 1325 | 20.1 | 7328 | 104.2 | 6 |
| M47I/A71G | 937 | 27768 | 14.5 | 823 | 12.5 | 5097 | 72.5 | 6 |
| E35D/M43I/M47L/L85M | 938 | 24584 | 12.8 | 265 | 4.0 | 4878 | 69.4 | 18 |
| E35D/M43I/D46E/A71G/ | 939 | 26878 | 14.0 | 200 | 3.0 | 7138 | 101.5 | 36 |
| L85M | | | | | | | | |
| H18Y/E35D/M47L/A71G/ | 940 | 24218 | 12.6 | 528 | 8.0 | 7582 | 107.9 | 14 |
| A91S | | | | | | | | |
| E35D/M47I/N48K/I61F | 941 | 25859 | 13.5 | 816 | 12.4 | 5627 | 80.0 | 7 |
| E35D/M47V/T62S/L85Q | 942 | 31230 | 16.3 | 99.4 | 1.5 | 6653 | 94.6 | 67 |
| M43I/M47L/A71G | 943 | 23292 | 12.2 | 1000 | 15.2 | 7763 | 110.4 | 8 |
| E35D/M47V | 944 | 20893 | 10.9 | 461 | 7.0 | 2935 | 41.7 | 6 |
| E35D/M47L/A71G/L85M | 945 | 16609 | 8.7 | 199 | 3.0 | 8312 | 118.2 | 42 |
| V22A/E35D/M47L/A71G | 946 | 21855 | 11.4 | 990 | 15.0 | 8168 | 116.2 | 8 |
| E35D/M47L/A71G | 947 | 20576 | 10.7 | 626 | 9.5 | 6635 | 94.4 | 11 |
| E35D/D46E/M47I | 948 | 21394 | 11.2 | 1001 | 15.2 | 3789 | 53.9 | 4 |
| Q27H/E35D/M47I | 949 | 27530 | 14.4 | 756 | 11.5 | 3424 | 48.7 | 5 |
| E35D/D46E/L85M | 950 | 30289 | 15.8 | 164 | 2.5 | 2880 | 41.0 | 18 |
| E35D/D46E/A91G | 951 | 32189 | 16.8 | 3450 | 52.3 | 2818 | 40.1 | 1 |
| E35D/D46E | 952 | 27921 | 14.6 | 779 | 11.8 | 3757 | 53.4 | 5 |
| E35D/L97R | 953 | 22803 | 11.9 | 44.6 | 0.7 | 2614 | 37.2 | 59 |
| H18Y/E35D | 954 | 26258 | 13.7 | 479 | 7.3 | 3526 | 50.2 | 7 |
| Q27L/E35D/M47V/I61V/ | 955 | 27881 | 14.6 | 230 | 3.5 | 2705 | 38.5 | 12 |
| L85M | | | | | | | | |
| E35D/M47V/I61V/L85M | 956 | 28848 | 15.1 | 274 | 4.2 | 3054 | 43.4 | 11 |
| E35D/M47V/L85M/R94Q | 957 | 23334 | 12.2 | 23.7 | 0.4 | 3039 | 43.2 | 128 |
| E35D/M47V/N48K/L85M | 958 | 11792 | 11.5 | 413 | 10.0 | 5660 | 67.9 | 14 |
| H18Y/E35D/M47V/N48K | 959 | 11747 | 11.4 | 841 | 20.4 | 6462 | 77.5 | 8 |
| WT CD80 ECD-Fc H22.6 | 2 | 31563 | 16.5 | 43 | 0.7 | 46.3 | 0.7 | 1 |
| CD80 WT IgV-Fc | 150 | 1916 | 1.0 | 66 | 1.0 | 70.3 | 1.0 | 1 |
| Inert Fc | 1520 | 65.7 | 0.0 | 23 | 0.4 | 41 | 0.6 | 2 |

TABLE E11
Flow Binding to Jurkats (CD28) and CHO cells stably expressing CTLA4 or PD-Ll

| | | CTLA4 | | CD28 | | PD-L1 | | Ratio |
|---|---|---|---|---|---|---|---|---|
| | SEQ | MFI at | Fold | MFI at | Fold | MFI at | Fold | of |
| | ID NO | 33.3 | change | 33.3 | change | 33.3 | change | PDL1: |
| CD80 mutation(s) | (IgV) | nM | to WT CD80 | nM | to WT CD80 | nM | to WT CD80 | CD28 |
| E24D/E35D/M47L/V68M/ | 980 | 15505 | 8.8 | 15 | 0.5 | 18649 | 362.1 | 1268.6 |
| E95V/L97Q | | | | | | | | |
| E35D/D46E/M47I/T62A/ | 981 | 16987 | 9.7 | 486 | 15.5 | 18734 | 363.8 | 38.5 |
| V68M/L85M/Y87C | | | | | | | | |
| E35D/D46E/M47I/V68M/ | 982 | 14036 | 8.0 | 353 | 11.2 | 16341 | 317.3 | 46.3 |
| L85M | | | | | | | | |
| E35D/D46E/M47L/V68M/ | 983 | 15098 | 8.6 | 425 | 13.5 | 24297 | 471.8 | 57.2 |
| A71G/Y87C/K93R | | | | | | | | |
| E35D/D46E/M47L/V68M/ | 984 | 15049 | 8.6 | 403 | 12.8 | 8641 | 167.8 | 21.4 |
| T79M/L85M | | | | | | | | |
| E35D/D46E/M47L/V68M/ | 985 | 96 | 0.1 | 14 | 0.5 | 4617 | 89.7 | 325.1 |
| T79M/L85M/L97Q | | | | | | | | |
| E35D/D46E/M47V/V68M/ | 986 | 15533 | 8.9 | 1740 | 55.4 | 1723 | 33.5 | 1.0 |
| L85Q | | | | | | | | |
| E35D/M43I/M47L/V68M | 987 | 16243 | 9.3 | 1517 | 48.3 | 16912 | 328.4 | 11.1 |
| E35D/M47I/V68M/Y87N | 988 | 17860 | 10.2 | 3553 | 113.2 | 13145 | 255.2 | 3.7 |
| E35D/M47L/V68M/E95V/ | 989 | 14955 | 8.5 | 14 | 0.5 | 18600 | 361.2 | 1300.7 |
| L97Q | | | | | | | | |
| E35D/M47L/Y53F/V68M/ | 990 | 16013 | 9.1 | 383 | 12.2 | 25024 | 485.9 | 65.3 |
| A71G/K93R/E95V | | | | | | | | |
| E35D/M47V/N48KN68M/ | 991 | 16604 | 9.5 | 302 | 9.6 | 22770 | 442.1 | 75.4 |
| A71G/L85M | | | | | | | | |
| E35D/M47V/N48KN68M/ | 992 | 15581 | 8.9 | 245 | 7.8 | 7618 | 147.9 | 31.1 |
| L85M | | | | | | | | |
| E35D/M47V/V68M/L85M | 993 | 15997 | 9.1 | 201 | 6.4 | 9177 | 178.2 | 45.7 |
| E35D/M47V/V68M/L85M/ | 994 | 13936 | 7.9 | 509 | 16.2 | 1721 | 33.4 | 3.4 |
| Y87D | | | | | | | | |
| E35D/T41S/D46E/M47I/ | 995 | 18369 | 10.5 | 476 | 15.2 | 14790 | 287.2 | 31.1 |
| V68M/K93R/E95V | | | | | | | | |
| H18Y/E35D/D46E/M47I/ | 996 | 23300 | 13.3 | 244 | 7.8 | 18806 | 365.2 | 77.1 |
| V68M/R94L | | | | | | | | |
| H18Y/E35D/M38I/M47L/ | 997 | 139 | 0.1 | 16.7 | 0.5 | 3589 | 69.7 | 214.9 |
| V68M/L85M | | | | | | | | |
| H18Y/E35D/M47I/V68M/ | 998 | 18626 | 10.6 | 4038 | 128.6 | 14988 | 291.0 | 3.7 |
| Y87N | | | | | | | | |
| H18Y/E35D/M47L/V68M/ | 999 | 19541 | 11.1 | 437 | 13.9 | 18669 | 362.5 | 42.7 |
| A71G/L85M | | | | | | | | |
| H18Y/E35D/M47L/V68M/ | 1000 | 20475 | 11.7 | 14.5 | 0.5 | 14750 | 286.4 | 1017.2 |
| E95V/L97Q | | | | | | | | |
| H18Y/E35D/M47L/Y53F/ | 1001 | 146 | 0.1 | 15.7 | 0.5 | 5105 | 99.1 | 325.2 |
| V68M/A71G | | | | | | | | |
| H18Y/E35D/M47L/Y53F/ | 1002 | 18356 | 10.5 | 334 | 10.6 | 23390 | 454.2 | 70.0 |
| V68M/A71G/K93R/E95V | | | | | | | | |
| H18Y/E35D/M47V/V68M/ | 1003 | 18367 | 10.5 | 373 | 11.9 | 16774 | 325.7 | 45.0 |
| L85M | | | | | | | | |
| H18Y/E35D/V68M/A71G/ | 1004 | 18281 | 10.4 | 16 | 0.5 | 14990 | 291.1 | 954.8 |
| R94Q/E95V | | | | | | | | |
| H18Y/E35D/V68M/L85M/ | 1005 | 19766 | 11.3 | 14 | 0.4 | 14410 | 279.8 | 1036.7 |
| R94Q | | | | | | | | |
| H18Y/E35D/V68M/T79M/ | 1006 | 16287 | 9.3 | 1041 | 33.2 | 14907 | 289.5 | 14.3 |
| L85M | | | | | | | | |
| H18Y/V22D/E35D/M47V/ | 1007 | 15798 | 9.0 | 257 | 8.2 | 12867 | 249.8 | 50.1 |
| N48K/V68M | | | | | | | | |
| Q27L/Q33L/E35D/T41S/ | 1008 | 178 | 0.1 | 15 | 0.5 | 16492 | 320.2 | 1129.6 |
| M47V/N48K/V68M/L85M | | | | | | | | |
| Q33L/E35D/M47V/T62S/ | 1009 | 86 | 0.0 | 15 | 0.5 | 16838 | 327.0 | 1107.8 |
| V68M/L85M | | | | | | | | |
| Q33R/E35D/M38I/M47L/ | 1010 | 107 | 0.1 | 15 | 0.5 | 16502 | 320.4 | 1107.5 |
| V68M | | | | | | | | |
| R29C/E35D/M47L/V68M/ | 1011 | 91 | 0.1 | 16 | 0.5 | 16251 | 315.6 | 997.0 |
| A71G/L85M | | | | | | | | |
| S21P/E35D/K37E/D46E/ | 1012 | 20616 | 11.8 | 540 | 17.2 | 17833 | 346.3 | 33.0 |
| M47I/V68M | | | | | | | | |
| S21P/E35D/K37E/D46E/ | 1013 | 20142 | 11.5 | 284 | 9.0 | 17789 | 345.4 | 62.6 |
| M47I/V68M/R94L | 1014 | 21255 | 12.1 | 15.6 | 0.5 | 19969 | 387.7 | 1280.1 |
| T13R/E35D/M47LN68M | | | | | | | | |
| T13R/Q27L/Q33L/E35D/ | 1016 | 109 | 0.1 | 14.6 | 0.5 | 3272 | 63.5 | 224.1 |
| T41S/M47V/N48K/V68M/ | | | | | | | | |
| L85M | | | | | | | | |
| T13R/Q33L/E35D/M47L/ | 1017 | 141 | 0.1 | 15.7 | 0.5 | 3228 | 62.7 | 205.6 |
| V68M/L85M | | | | | | | | |
| T13R/Q33L/E35D/M47V/ | 1018 | 105 | 0.1 | 16 | 0.5 | 3968 | 77.0 | 248.0 |
| T62S/V68M/L85M | | | | | | | | |
| T13R/Q33R/E35D/M38I/ | 1019 | 193 | 0.1 | 13.8 | 0.4 | 4482 | 87.0 | 324.8 |
| M47L/V68M | | | | | | | | |
| T13R/Q33R/E35D/M38I/ | 1020 | 20652 | 11.8 | 1111 | 35.4 | 19157 | 372.0 | 17.2 |
| M47L/V68M/E95V/L97Q | | | | | | | | |
| T13R/Q33R/E35D/M38I/ | 1021 | 22011 | 12.6 | 14.2 | 0.5 | 1106 | 21.5 | 77.9 |
| M47L/V68M/L85M | | | | | | | | |
| T13R/Q33R/E35D/M38I/ | 1022 | 19105 | 10.9 | 15.2 | 0.5 | 20366 | 395.5 | 1339.9 |
| M47L/V68M/L85M/R94Q | | | | | | | | |
| T13R/Q33R/E35D/M47L/ | 1023 | 20738 | 11.8 | 14.1 | 0.4 | 14680 | 285.0 | 1041.1 |
| V68M | | | | | | | | |
| T13R/Q33R/E35D/M47L/ | 1024 | 13438 | 7.7 | 112 | 3.6 | 18938 | 367.7 | 169.1 |
| V68M/L85M | | | | | | | | |
| V22D/E24D/E35D/M47L/ | 1025 | 19403 | 11.1 | 1254 | 39.9 | 15418 | 299.4 | 12.3 |
| V68M | | | | | | | | |
| V22D/E24D/E35D/M47L/ | 1026 | 14574 | 8.3 | 1183 | 37.7 | 19047 | 369.8 | 16.1 |
| V68M/L85M/D90G | | | | | | | | |
| V22D/E24D/E35D/M47V/ | 1027 | 16899 | 9.6 | 191 | 6.1 | 17793 | 345.5 | 93.2 |
| V68M | | | | | | | | |
| WT CD80 ECD-Fc | 2 | 1753 | 1.0 | 31 | 1.0 | 52 | 1.0 | 1.6 |
| CD80 WT IgV-Fc | 150 | 26392 | 15.1 | 95 | 3.0 | 44 | 0.9 | 0.5 |

[0872] Bioactivity Assessment

TABLE E12
Jurkat/IL2 + CHO/OKT3/PD-L1 Reporter Assay:
Relative Luciferase Units (RLU)

| | SEQ | CD80 | Fold Increase |
|---|---|---|---|
| | ID | Cone | over WT |
| CD80 Mutation(s) | NO: | 5.0 nM | CD80-IgV-Fe |
| E35D/N48K/L72V | 934 | 1731 | 4.3 |
| E35D/T41S/N48T | 935 | 1136 | 2.8 |
| D46V/M47I/A71G | 936 | 1601 | 4.0 |
| M47I/A71G | 937 | 1762 | 4.4 |
| E35D/M43I/M47L/L85M | 938 | 1427 | 3.6 |
| E35D/M43I/D46E/A71G/ | 939 | 1475 | 3.7 |
| L85M | | | |
| H18Y/E35D/M47L/ | 940 | 1898 | 4.7 |
| A71G/A91S | | | |
| E35D/M47I/N48K/I61F | 941 | 2078 | 5.2 |
| E35D/M47V/T62S/L85Q | 942 | 1402 | 3.5 |
| M43I/M47L/A71G | 943 | 1641 | 4.1 |
| E35D/M47V | 944 | 1353 | 3.4 |
| E35D/M47L/A71G/L85M | 945 | 1513 | 3.8 |
| V22A/E35D/M47L/A71G | 946 | 2583 | 6.5 |
| E35D/M47L/A71G | 947 | 1954 | 4.9 |
| E35D/D46E/M47I | 948 | 1915 | 4.8 |
| Q27H/E35D/M47I | 949 | 1829 | 4.6 |
| E35D/D46E/L85M | 950 | 1413 | 3.5 |
| E35D/D46E/A91G | 951 | 395 | 1.0 |
| E35D/D46E | 952 | 1961 | 4.9 |
| E35D/L97R | 953 | 914 | 2.3 |
| H18Y/E35D | 954 | 1990 | 5.0 |
| Q27L/E35D/M47V/ | 955 | 1166 | 2.9 |
| I61V/L85M | | | |
| E35D/M47V/I61V/L85M | 956 | 1176 | 2.9 |
| E35D/M47V/L85M/R94Q | 957 | 466 | 1.2 |
| E35D/M47V/N48K/L85M | 958 | 2116 | 5.3 |
| H18Y/E35D/M47V/N48K | 959 | 2146 | 5.4 |
| CD80 WT IgV-Fc | 150 | 400 | 1.0 |
| CD80 ECD-Fc | 2 | 521 | 1.3 |

TABLE E13
Jurkat/IL2 + CHO/OKT3/PD-L1 Reporter Assay:
Relative Luciferase Units (RLU)

| | SEQ ID | CD80 | Fold Increase |
|---|---|---|---|
| | NO | Cone | over WT CD80- |
| CD80 Mutation(s) | (IgV) | 5.0 nM | IgV-Fe |
| E24D/E35D/M47L/V68M/E95V/L97Q | 980 | 1087 | 2.7 |
| E35D/D46E/M47I/T62A/V68M/L85M/Y87C | 981 | 1104 | 2.8 |
| E35D/D46E/M47I/V68M/L85M | 982 | 1230 | 3.1 |
| E35D/D46E/M47L/V68M/A71G/Y87C/K93R | 983 | 1198 | 3.0 |
| E35D/D46E/M47L/V68M/T79M/L85M | 984 | 1137 | 2.8 |
| E35D/D46E/M47L/V68M/T79M/L85M/L97Q | 985 | 160 | 0.4 |
| E35D/D46E/M47V/V68M/L85Q | 986 | 1006 | 2.5 |
| E35D/M43I/M47L/V68M | 987 | 1072 | 2.7 |
| E35D/M47I/V68M/Y87N | 988 | 958 | 2.4 |
| E35D/M47L/V68M/E95V/L97Q | 989 | 1086 | 2.7 |
| E35D/M47L/Y53F/V68M/A71G/K93R/E95V | 990 | 1546 | 3.9 |
| E35D/M47V/N48K/V68M/A71G/L85M | 991 | 1422 | 3.6 |
| E35D/M47V/N48K/V68M/L85M | 992 | 1203 | 3.0 |
| E35D/M47V/V68M/L85M | 993 | 1167 | 2.9 |
| E35D/M47V/V68M/L85M/Y87D | 994 | 1181 | 3.0 |
| E35D/T41S/D46E/M47I/V68M/K93R/E95V | 995 | 1165 | 2.9 |
| H18Y/E35D/D46E/M47I/V68M/R94L | 996 | 1425 | 3.6 |
| H18Y/E35D/M38I/M47L/V68M/L85M | 997 | 198 | 0.5 |
| H18Y/E35D/M47I/V68M/Y87N | 998 | 1117 | 2.8 |
| H18Y/E35D/M47L/V68M/A71G/L85M | 999 | 1219 | 3.0 |
| H18Y/E35D/M47L/V68M/E95V/L97Q | 1000 | 225 | 0.6 |
| H18Y/E35D/M47L/Y53F/V68M/A71G | 1001 | 120 | 0.3 |
| H18Y/E35D/M47L/Y53F/V68M/A71G/ | 1002 | 1190 | 3.0 |
| K93R/E95V | | | |
| H18Y/E35D/M47V/V68M/L85M | 1003 | 1013 | 2.5 |
| H18Y/E35D/V68M/A71G/R94Q/E95V | 1004 | 183 | 0.5 |
| H18Y/E35D/V68M/L85M/R94Q | 1005 | 195 | 0.5 |
| H18Y/E35D/V68M/T79M/L85M | 1006 | 1161 | 2.9 |
| H18Y/V22D/E35D/M47V/N48K/V68M | 1007 | 1072 | 2.7 |
| Q27L/Q33L/E35D/T41S/M47V/N48K/ | 1008 | 170 | 0.4 |
| V68M/L85M | | | |
| Q33L/E35D/M47V/T62S/V68M/L85M | 1009 | 158 | 0.4 |
| Q33R/E35D/M38I/M47L/V68M | 1010 | 147 | 0.4 |
| R29C/E35D/M47L/V68M/A71G/L85M | 1011 | 155 | 0.4 |
| S21P/E35D/K37E/D46E/M47I/V68M | 1012 | 1064 | 2.7 |
| S21P/E35D/K37E/D46E/M47I/V68M/R94L | 1013 | 1205 | 3.0 |
| T13R/E35D/M47L/V68M | 1014 | 1021 | 2.6 |
| T13R/Q27L/Q33L/E35D/T41S/M47V/N48KN | 1016 | 170 | 0.4 |
| 68M/L85M | | | |
| T13R/Q33L/E35D/M47L/V68M/L85M | 1017 | 153 | 0.4 |
| T13R/Q33L/E35D/M47V/T62S/V68M/L85M | 1018 | 136 | 0.3 |
| T13R/Q33R/E35D/M38I/M47L/V68M | 1019 | 152 | 0.4 |
| T13R/Q33R/E35D/M38I/M47L/ | 1020 | 993 | 2.5 |
| V68M/E95V/L97Q | | | |
| T13R/Q33R/E35D/M38I/M47L/V68M/L85M | 1021 | 153 | 0.4 |
| T13R/Q33R/E35D/M38I/M47L/V68M/L85M/ | 1022 | 580 | 1.5 |
| R94Q | | | |
| T13R/Q33R/E35D/M47L/V68M | 1023 | 399 | 1.0 |
| T13R/Q33R/E35D/M47L/V68M/L85M | 1024 | 1160 | 2.9 |
| V22D/E24D/E35D/M47L/V68M | 1025 | 974 | 2.4 |
| V22D/E24D/E35D/M47L/V68M/L85M/D90G | 1026 | 963 | 2.4 |
| V22D/E24D/E35D/M47V/V68M | 1027 | 1023 | 2.6 |
| CD80 WT IgV-Fc | 150 | 400 | 1.0 |
| WT CD80 ECD-Fc H22.6 | 2 | 521 | 1.3 |

[0873] B. Generation of Variant CD8r IgV Binding Domains and High-Throughput Selection

[0874] Additional CD80 IgV variants were selected after generating 300 CD80 IgV-Fc constructs from the yeast outputs described in Example 7. Supernatants containing the CD80 IgV-Fc proteins were then screened for PD-L1 binding in a 96-well plate format using an Octet® System. Variants that exhibited high PD-L1 binding were selected and rescreened for binding as described in Example 7 above, and variants were selected that exhibited high PD-L11 binding. Exemplary variants and the FACS binding data are provided in Table E14. The selected variants also were assessed for bioactivity using the methods substantially as described in Example 9, and the results are shown in Table E15.

TABLE E14
Flow Binding to Jurkats (CD28) and CHO cells stably expressing CTLA4 or PD-L1

| | | CTLA4 | | CD28 | | PD-L1 | | Ratio |
|---|---|---|---|---|---|---|---|---|
| | SEQ | MFI at | Fold | MFI at | Fold | MFI at | Fold | of |
| | ID NO | 33.3 | change | 33.3 | change | 33.3 | change | PDL1: |
| CD80 mutation(s) | (IgV) | nM | to WT CD80 | nM | to WT | nM | to WT | CD28 |
| A26E/Q27R/E35D/M47L/ | 538 | 10848 | 10.6 | 78 | 1.9 | 9315 | 111.7 | 119 |
| N48Y/L85Q | | | | | | | | |
| E35D/D46E/M47L/V68M/ | 539 | 214 | 0.2 | 15 | 0.4 | 13200 | 158.3 | 863 |
| L85Q/F92L | | | | | | | | |
| E35D/M47I/T62S/L85Q/ | 540 | 8913 | 8.7 | 111 | 2.7 | 8417 | 100.9 | 76 |
| E88D | | | | | | | | |
| E24D/Q27R/E35D/T41S | 541 | 13867 | 13.5 | 66 | 1.6 | 2858 | 34.3 | 44 |
| M47V/L85Q | | | | | | | | |
| S15T/H18Y/E35D/M47V/ | 542 | 10994 | 10.7 | 1068 | 25.9 | 13883 | 166.5 | 13 |
| T62A/N64S/A71G/L85Q/ | | | | | | | | |
| D90N | | | | | | | | |
| E35D/M47LN68M/A71G/ | 543 | 10332 | 10.1 | 1400 | 33.9 | 16832 | 201.8 | 12 |
| L85Q/D90G | | | | | | | | |
| H18Y/E35D/M47I/V68M/ | 544 | 10036 | 9.8 | 1905 | 46.1 | 14487 | 173.7 | 8 |
| A71G/R94L | | | | | | | | |
| deltaE10-A98 | 545 | 125 | 0.1 | 15 | 0.4 | 45 | 0.5 | 3 |
| Q33R/M47V/T62N/A71G | 546 | 308 | 0.3 | 17 | 0.4 | 12216 | 146.5 | 719 |
| H18Y/V22A/E35D/T41S/ | 547 | 10290 | 10.0 | 1591 | 38.5 | 8459 | 101.4 | 5 |
| M47V/T62N/A71G/A91G | | | | | | | | |
| CD80 WT IgV-Fc | 150 | 1026 | 1.0 | 41 | 1.0 | 83 | 1.0 | 2 |
| CD80 ECD-Fc | 2 | 31725 | 30.9 | 30 | 0.7 | 68 | 0.8 | 2 |

TABLE E15
Jurkat/IL2 + CHO/OKT3/PD-L1 Reporter Assay:
Relative Luciferase Units (RLU)

| | SEQ | CD80-Fe | Fold Increase |
|---|---|---|---|
| | ID NO | Cone | over WT CD80- |
| CD80 Mutations | (IgV) | 5.0 nM | IgV-Fe |
| A26E/Q27R/E35D/M47L/N48Y/L85Q | 538 | 433 | 1.1 |
| E35D/D46E/M47L/V68M/L85Q/F92L | 539 | 2551 | 6.4 |
| E35D/M47I/T62S/L85Q/E88D | 540 | 605 | 1.5 |
| E24D/Q27R/E35D/T41S/M47V/L85Q | 541 | 147 | 0.4 |
| S15T/H18Y/E35D/M47V/T62A/ | 542 | 872 | 2.2 |
| N64S/A71G/L85Q/D90N | | | |
| E35D/M47L/V68M/A71G/L85Q/D90G | 543 | 936 | 2.3 |
| H18Y/E35D/M47I/V68M/A71G/R94L | 544 | 879 | 2.2 |
| deltaE10-A98 | 545 | 137 | 0.3 |
| Q33R/M47V/T62N/A71G | 546 | 149 | 0.4 |
| H18Y/V22A/E35D/T41S/M47V/T62N/A71G/A91G | 547 | 1045 | 2.6 |
| CD80 WT IgV-Fc | 150 | 400 | 1.0 |
| CD80 ECD-Fc | 2 | 521 | 1.3 |

[0875] C. Generation of CD80 IgV Consensus Variants

[0876] Consensus variants of CD80 IgV variants were designed based on the alignments of outputs from all of the yeast selections described above. The consensus sequences were then used to generate CD80 IgV-Fc proteins that were then tested for binding and bioactivity as described above. The binding and bioactivity results are provided in Tables E16 and E17, respectively.

TABLE E16
Flow Binding to Jurkats (CD28) and CHO cells stably expressing
CTLA4 or PD-L1

| | | CTLA4 | | CD28 | | PD-L1 | | |
|---|---|---|---|---|---|---|---|---|
| | | | Fold | | Fold | | Fold | |
| | | MFI | change | MFI | change | MFI | change | Ratio |
| | | at | to | at | to | at | to | of |
| | SEQ ID | 33.3 | WT | 33.3 | WT | 33.3 | WT | PDL1: |
| CD80 Mutations | NO (IgV) | nM | CD80 | nM | CD80 | nM | CD80 | CD28 |
| H18Y/E35D/D46E/M47I/ | 996 | 19236 | 18.4 | 1006 | 24.4 | 2082 | 29.4 | 2.1 |
| V68M/R94L | | | | | | | | |
| H18Y/E35D/M47I/V68M/ | 998 | 19722 | 18.9 | 1429 | 34.7 | 9299 | 131.2 | 6.5 |
| Y87N | | | | | | | | |
| H18Y/E35D/M47L/V68M/ | 999 | 20660 | 19.8 | 2848 | 69.1 | 9894 | 139.5 | 3.5 |
| A71G/L85M | | | | | | | | |
| H18Y/E35D/M47L/V68M/ | 1000 | 18022 | 17.2 | 2602 | 63.2 | 9629 | 135.8 | 3.7 |
| E95V/L97Q | | | | | | | | |
| H18Y/E35D/M47L/Y53F/ | 1001 | 19528 | 18.7 | 478 | 11.6 | 9576 | 135.1 | 20.0 |
| V68M/A71G | | | | | | | | |
| H18Y/E35D/M47L/Y53F/ | 1002 | 19754 | 18.9 | 2194 | 53.3 | 9339 | 131.7 | 4.3 |
| V68M/A71G/K93R/E95V | | | | | | | | |
| H18Y/E35D/M47V/V68M/ | 1003 | 19306 | 18.5 | 1387 | 33.7 | 3094 | 43.6 | 2.2 |
| L85M | | | | | | | | |
| H18Y/E35D/V68M/A71G/ | 1004 | 19396 | 18.6 | 455 | 11.0 | 1836 | 25.9 | 4.0 |
| R94Q/E95V | | | | | | | | |
| H18Y/E35D/V68M/L85M/ | 1005 | 21955 | 21.0 | 962 | 23.3 | 9283 | 130.9 | 9.6 |
| R94Q | | | | | | | | |
| CD80 WT IgV-Fc | 150 | 1045 | 1.0 | 41.2 | 1.0 | 70.9 | 1.0 | 1.7 |
| CD80 ECD-Fc | 2 | 46137 | 44.2 | 46 | 1.1 | 58 | 0.8 | 1.3 |

TABLE E17
Jurkat/IL2 + CHO/OKT3/PD-L1 Reporter Assay:
Relative Luciferase Units (RLU)

| | SEQ | CD80 | Fold Increase |
|---|---|---|---|
| | ID | Cone | over WT |
| CD80 Mutations | NO: | 5.0 nM | CD80-IgV-Fe |
| H18Y/E35D/D46E/M47I/V68M/ | 996 | 2850 | 7.1 |
| R94L | | | |
| H18Y/E35D/M47I/V68M/Y87N | 998 | 2196 | 5.5 |
| H18Y/E35D/M47L/V68M/A71G/ | 999 | 2193 | 5.5 |
| L85M | | | |
| H18Y/E35D/M47L/V68M/E95V/L97 [symbol] | 1000 | 2052 | 5.1 |
| H18Y/E35D/M47L/Y53F/V68M/ | 1001 | 2277 | 5.7 |
| A71G | | | |
| H18Y/E35D/M47L/Y53F/V68M/ | 1002 | 2212 | 5.5 |
| A71G/K93R/E95V | | | |
| H18Y/E35D/M47V/V68M/L85M | 1003 | 2575 | 6.4 |
| H18Y/E35D/V68M/A71G/R94Q/ | 1004 | 1968 | 4.9 |
| E95V | | | |
| H18Y/E35D/V68M/L85M/R94Q | 1005 | 2215 | 5.5 |
| CD80 WT IgV-Fc | 150 | 400 | 1.0 |
| CD80 ECD-Fc | 2 | 521 | 1.3 |

[symbol]

indicates data missing or illegible when filed

### Example 11

### Assessment of Binding Activity of a Panel of CD80 IgV Variants

[0877] To identify residues involved in binding and activity with reference to a selected set of variants set forth in SEQ ID NOs: 465, 491, and 495, a panel of reversion (back) mutations were designed and expressed as Fc fusion proteins substantially as described in Examples 4 and 5. The variants generated contained between 1 and 6 mutations found in SEQ ID NOS: 465, 491, and 495 in various combinations as set forth in Table E18.

TABLE E18
Additional CD80 Variants

| Mutation | SEQ ID NO: |
|---|---|
| E35D | 198 |
| D46V | 1028 |
| M47L | 1029 |
| V68M | 1030 |
| L85Q | 1031 |
| E35D/D46V | 1032 |
| E35D/M47L | 208 |
| E35D/L85Q | 1034 |
| D46V/M47L | 1035 |
| D46V/V68M | 1036 |
| D46V/L85Q | 1037 |
| M47L/V68M | 1038 |
| M47L/L85Q | 1039 |
| V68M/L85Q | 1040 |
| E35D/D46V/M47L | 1041 |
| E35D/D46V/V68M | 1042 |
| E35D/D46V/L85Q | 1043 |
| E35D/M47L/V68M | 971 |
| E35D/M47L/L85Q | 418 |
| E35D/V68M/L85Q | 1044 |
| D46V/M47L/V68M | 1045 |
| D46V/M47L/L85Q | 1046 |
| D46V/V68M/L85Q | 1047 |
| M47L/V68M/L85Q | 1048 |
| E35D/D46V/M47L/V68M | 976 |
| E35D/D46V/M47L/L85Q | 1049 |
| E35D/D46V/V68M/L85Q | 1050 |
| E35D/M47L/V68M/L85Q | 1051 |
| D46V/M47L/V68M/L85Q | 1052 |
| E35D/D46V/M47L/V68M/L85Q | 975 |
| M47V | 1053 |
| N48K | 1054 |
| K89N | 1055 |
| E35D/M47V | 944 |
| E35D/N48K | 1056 |
| E35D/K89N | 1057 |
| M47V/N48K | 1058 |
| M47V/V68M | 1059 |
| M47V/K89N | 1060 |
| N48K/V68M | 1061 |
| N48K/K89N | 1062 |
| V68M/K89N | 1063 |
| E35D/M47V/N48K | 1064 |
| E35D/M47V/V68M | 1065 |
| E35D/M47V/K89N | 1066 |
| E35D/N48K/V68M | 1067 |
| E35D/N48K/K89N | 1068 |
| E35D/V68M/K89N | 1069 |
| M47V/N48K/V68M | 1070 |
| M47V/N48K/K89N | 1071 |
| M47V/V68M/K89N | 1072 |
| N48K/V68M/K89N | 1073 |
| E35D/M47V/N48K/V68M | 979 |
| E35D/M47V/N48K/K89N | 1074 |
| E35D/M47V/V68M/K89N | 1075 |
| E35D/N48K/V68M/K89N | 1076 |
| M47V/N48K/V68M/K89N | 1077 |
| E35D/D46V/M47V/N48K/V68M | 1078 |
| E35D/D46V/M47V/V68M/L85Q | 1079 |
| E35D/D46V/M47V/V68M/K89N | 1080 |
| E35D/M47V/N48K/V68M/L85Q | 1081 |
| E35D/M47V/N48K/V68M/K89N | 465 |
| E35D/M47V/V68M/L85Q/K89N | 1082 |
| A26E/E35D/M47L/V68M/A71G/D90G | 1083 |
| H18Y/E35D/M47L/V68M/A71G/D90G | 1084 |
| H18Y/A26E/M47L/V68M/A71G/D90G | 1085 |
| H18Y/A26E/E35D/V68M/A71G/D90G | 1086 |
| H18Y/A26E/E35D/M47L/A71G/D90G | 1087 |
| H18Y/A26E/E35D/M47L/V68M/D90G | 1088 |
| H18Y/A26E/E35D/M47L/V68M/A71G | 1089 |
| E35D/M47L/V68M/A71G/D90G | 1090 |
| H18Y/M47L/V68M/A71G/D90G | 1091 |
| H18Y/A26E/V68M/A71G/D90G | 1092 |
| H18Y/A26E/E35D/A71G/D90G | 1093 |
| H18Y/A26E/E35D/M47L/D90G | 1094 |
| H18Y/A26E/E35D/M47L/V68M | 1095 |
| A26E/M47L/V68M/A71G/D90G | 1096 |
| A26E/E35D/V68M/A71G/D90G | 1097 |
| A26E/E35D/M47L/A71G/D90G | 1098 |
| A26E/E35D/M47L/V68M/D90G | 1099 |
| A26E/E35D/M47L/V68M/A71G | 1100 |
| H18Y/E35D/V68M/A71G/D90G | 1101 |
| H18Y/E35D/M47L/A71G/D90G | 1102 |
| H18Y/E35D/M47L/V68M/D90G | 1103 |
| H18Y/E35D/M47L/V68M/A71G | 1104 |
| H18Y/A26E/M47L/A71G/D90G | 1105 |
| H18Y/A26E/M47L/V68M/D90G | 1106 |
| H18Y/A26E/M47L/V68M/A71G | 1107 |
| H18Y/A26E/E35D/V68M/D90G | 1108 |
| H18Y/A26E/E35D/V68M/A71G | 1109 |
| H18Y/A26E/E35D/M47L/A71G | 1110 |
| M47L/V68M/A71G/D90G | 1111 |
| H18Y/V68M/A71G/D90G | 1112 |
| H18Y/A26E/A71G/D90G | 1113 |
| H18Y/A26E/E35D/D90G | 1114 |
| H18Y/A26E/E35D/M47L | 1115 |
| E35D/V68M/A71G/D90G | 1116 |
| E35D/M47L/A71G/D90G | 1117 |
| E35D/M47L/V68M/D90G | 1118 |
| E35D/M47L/V68M/A71G | 1119 |
| A26E/V68M/A71G/D90G | 1120 |
| A26E/M47L/A71G/D90G | 1121 |
| A26E/M47L/V68M/D90G | 1122 |
| A26E/M47L/V68M/A71G | 1123 |
| A26E/E35D/V68M/D90G | 1125 |
| A26E/E35D/V68M/A71G | 1126 |
| A26E/E35D/M47L/D90G | 1127 |
| A26E/E35D/M47L/A71G | 1128 |
| H18Y/M47L/A71G/D90G | 1129 |
| H18Y/M47L/V68M/D90G | 1130 |
| H18Y/M47L/V68M/A71G | 1131 |
| H18Y/E35D/A71G/D90G | 1132 |
| H18Y/E35D/M47L/A71G | 1136 |
| H18Y/A26E/V68M/D90G | 1138 |
| H18Y/A26E/V68M/A71G | 1139 |
| H18Y/A26E/M47L/D90G | 1140 |
| H18Y/A26E/M47L/A71G | 1141 |
| H18Y/A26E/E35D/V68M | 1144 |

[0878] The variants were tested for binding and bioactivity as described above. The binding results are set forth in Tables E19 and E20, and the bioactivity results are set forth in Tables E21 and E22.

TABLE E19
Flow Binding to Jurkats (CD28) and CHO cells stably expressing CTLA4 or PD-
L1

| | | CTLA4 | | CD28 | | PD-L1 | | |
|---|---|---|---|---|---|---|---|---|
| | | | Fold | | Fold | | Fold | |
| | | MFI | change | MFI | change | MFI | change | Ratio |
| | | at | to | at | to | at | to | of |
| | SEQ ID | 33.3 | WT | 33.3 | WT | 33.3 | WT | PDL1: |
| Mutation(s) | NO (IgV) | nM | CD80 | nM | CD80 | nM | CD80 | CD28 |
| E35D | 198 | 42923 | 1.1 | 134 | 0.2 | 2584 | 20.2 | 19.3 |
| M47L | 2814 | 30774 | 0.8 | 309 | 0.4 | 1895 | 14.8 | 6.1 |
| V68M | 2815 | 568 | 0.0 | 37.9 | 0.1 | 118 | 0.9 | 3.1 |
| L85Q | 2816 | 3002 | 0.1 | 35 | 0.0 | 97 | 0.8 | 2.8 |
| E35D/D46V | 2817 | 50112 | 1.2 | 880 | 1.2 | 3971 | 31.0 | 4.5 |
| E35D/M47L | 208 | 48010 | 1.2 | 411 | 0.6 | 7529 | 58.8 | 18.3 |
| D46V/M47L | 2820 | 49711 | 1.2 | 918 | 1.3 | 3905 | 30.5 | 4.3 |
| D46V/V68M | 2821 | 5334 | 0.1 | 556 | 0.8 | 2271 | 17.7 | 4.1 |
| D46V/L85Q | 2822 | 41896 | 1.0 | 131 | 0.2 | 2197 | 17.2 | 16.8 |
| M47L/L85Q | 2824 | 31671 | 0.8 | 88.1 | 0.1 | 5801 | 45.3 | 65.8 |
| V68M/L85Q | 2825 | 3288 | 0.1 | 91.7 | 0.1 | 347 | 2.7 | 3.8 |
| E35D/D46V/M47L | 2826 | 44977 | 1.1 | 1165 | 1.6 | 7988 | 62.4 | 6.9 |
| E35D/D46V/V68M | 2827 | 31195 | 0.8 | 1820 | 2.6 | 26114 | 204.0 | 14.3 |
| E35D/D46V/L85Q | 2828 | 48005 | 1.2 | 196 | 0.3 | 4039 | 31.6 | 20.6 |
| E35D/M47L/V68M | 2756 | 28603 | 0.7 | 1243 | 1.8 | 27896 | 217.9 | 22.4 |
| E35D/M47L/L85Q | 2203 | 12909 | 0.3 | 46.3 | 0.1 | 6097 | 47.6 | 131.7 |
| E35D/V68M/L85Q | 2829 | 42761 | 1.1 | 76.2 | 0.1 | 5971 | 46.6 | 78.4 |
| D46V/M47L/V68M | 2830 | 34688 | 0.9 | 2183 | 3.1 | 28020 | 218.9 | 12.8 |
| D46V/M47L/L85Q | 2831 | 40153 | 1.0 | 567 | 0.8 | 5976 | 46.7 | 10.5 |
| D46V/V68M/L85Q | 2832 | 7567 | 0.2 | 104 | 0.1 | 4170 | 32.6 | 40.1 |
| M47L/V68M/L85Q | 2833 | 11134 | 0.3 | 60.9 | 0.1 | 4039 | 31.6 | 66.3 |
| E35D/D46V/M47L/V68M | 2761 | 34319 | 0.8 | 1808 | 2.6 | 29266 | 228.6 | 16.2 |
| E35D/D46V/M47L/L85Q | 2834 | 38150 | 0.9 | 268 | 0.4 | 7523 | 58.8 | 28.1 |
| E35D/D46V/V68M/L85Q | 2835 | 32176 | 0.8 | 261 | 0.4 | 23637 | 184.7 | 90.6 |
| E35D/M47L/V68M/L85Q | 2836 | 28106 | 0.7 | 159 | 0.2 | 15307 | 119.6 | 96.3 |
| D46V/M47L/V68M/L85Q | 2837 | 32521 | 0.8 | 660 | 0.9 | 29743 | 232.4 | 45.1 |
| E35D/D46V/M47L/V68M/ | 2760 | 26207 | 0.6 | 464 | 0.7 | 28418 | 222.0 | 61.2 |
| L85Q | | | | | | | | |
| M47V | 2838 | 33341 | 0.8 | 68.7 | 0.1 | 2317 | 18.1 | 33.7 |
| N48K | 2839 | 4952 | 0.1 | 60.1 | 0.1 | 481 | 3.8 | 8.0 |
| K89N | 2840 | 944 | 0.0 | 56.3 | 0.1 | 52.8 | 0.4 | 0.9 |
| E35D/M47V | 2729 | 44569 | 1.1 | 501 | 0.7 | 6796 | 53.1 | 13.6 |
| E35D/N48K | 2841 | 41325 | 1.0 | 194 | 0.3 | 6545 | 51.1 | 33.7 |
| E35D/K89N | 2842 | 21755 | 0.5 | 236 | 0.3 | 757 | 5.9 | 3.2 |
| M47V/N48K | 2843 | 44640 | 1.1 | 413 | 0.6 | 3083 | 24.1 | 7.5 |
| M47V/V68M | 2844 | 7282 | 0.2 | 328 | 0.5 | 4294 | 33.5 | 13.1 |
| M47V/K89N | 2845 | 32381 | 0.8 | 197 | 0.3 | 622 | 4.9 | 3.2 |
| N48K/V68M | 2846 | 2341 | 0.1 | 118 | 0.2 | 754 | 5.9 | 6.4 |
| N48K/K89N | 2847 | 4370 | 0.1 | 170 | 0.2 | 186 | 1.5 | 1.1 |
| V68M/K89N | 2848 | 2330 | 0.1 | 210 | 0.3 | 538 | 4.2 | 2.6 |
| E35D/M47V/N48K | 2849 | 47430 | 1.2 | 771 | 1.1 | 4852 | 37.9 | 6.3 |
| E35D/M47V/V68M | 2850 | 26988 | 0.7 | 791 | 1.1 | 16645 | 130.0 | 21.0 |
| E35D/M47V/K89N | 2851 | 39282 | 1.0 | 507 | 0.7 | 4336 | 33.9 | 8.6 |
| E35D/N48K/V68M | 2852 | 33583 | 0.8 | 642 | 0.9 | 17733 | 138.5 | 27.6 |
| E35D/N48K/K89N | 2853 | 34727 | 0.9 | 411 | 0.6 | 5766 | 45.0 | 14.0 |
| E35D/V68M/K89N | 2854 | 24838 | 0.6 | 1191 | 1.7 | 10422 | 81.4 | 8.8 |
| M47V/N48K/V68M | 2855 | 34612 | 0.9 | 641 | 0.9 | 14464 | 113.0 | 22.6 |
| M47V/N48K/K89N | 2856 | 42071 | 1.0 | 366 | 0.5 | 2366 | 18.5 | 6.5 |
| M47V/V68M/K89N | 2857 | 24787 | 0.6 | 1324 | 1.9 | 11806 | 92.2 | 8.9 |
| N48K/V68M/K89N | 2858 | 19129 | 0.5 | 1176 | 1.7 | 11464 | 89.6 | 9.7 |
| E35D/M47V/N48K/V68M | 2764 | 32913 | 0.8 | 789 | 1.1 | 23479 | 183.4 | 29.8 |
| E35D/M47V/N48K/K89N | 2859 | 43756 | 1.1 | 701 | 1.0 | 6669 | 52.1 | 9.5 |
| E35D/M47V/V68M/K89N | 2860 | 29493 | 0.7 | 1610 | 2.3 | 21827 | 170.5 | 13.6 |
| E35D/N48K/V68M/K89N | 2861 | 29772 | 0.7 | 1534 | 2.2 | 17425 | 136.1 | 11.4 |
| M47V/N48K/V68M/K89N | 2862 | 29777 | 0.7 | 1597 | 2.3 | 23666 | 184.9 | 14.8 |
| E35D/D46V/M47V/N48K/ | 2863 | 23880 | 0.6 | 1085 | 1.5 | 25940 | 202.7 | 23.9 |
| V68M | | | | | | | | |
| E35D/D46V/M47V/V68M/ | 2864 | 36463 | 0.9 | 331 | 0.5 | 26290 | 205.4 | 79.4 |
| L85Q | | | | | | | | |
| E35D/D46V/M47V/V68M/ | 2865 | 15124 | 0.4 | 2119 | 3.0 | 21603 | 168.8 | 10.2 |
| K89N | | | | | | | | |
| E35D/M47V/N48K/V68M/ | 2866 | 26104 | 0.6 | 118 | 0.2 | 10479 | 81.9 | 88.8 |
| L85Q | | | | | | | | |
| E35D/M47V/N48K/V68M/ | 2250 | 20884 | 0.5 | 1348 | 1.9 | 14800 | 115.6 | 11.0 |
| K89N | | | | | | | | |
| E35D/M47V/V68M/L85Q/ | 2867 | 30276 | 0.7 | 246 | 0.3 | 12085 | 94.4 | 49.1 |
| K89N | | | | | | | | |
| WT CD80 ECD-Fc | | 40376 | 1.0 | 709 | 1.0 | 128 | 1.0 | 0.2 |
| (Abcam) | | | | | | | | |
| Fc Control | 1520 | 52 | 0.0 | 12.7 | 0.0 | 44 | 0.3 | 3.5 |

TABLE E20
Flow Binding to Jurkats (CD28) and CHO cells stably expressing CTLA4 or PD-
L1

| | | CTLA4 | | CD28 | | PD-L1 | | |
|---|---|---|---|---|---|---|---|---|
| | | | Fold | | Fold | | Fold | |
| | | MFI | change | MFI | change | MFI | change | Ratio |
| | | at | to | at | to | at | to | of |
| | SEQ ID | 33.3 | WT | 33.3 | WT | 33.3 | WT | PDL1: |
| Mutation(s) | NO (IgV) | nM | CD80 | nM | CD80 | nM | CD80 | CD28 |
| A26E/E35D/M47L/V68M/ | 1083 | 21749 | 16.0 | 2211 | 50.4 | 30232 | 693.4 | 13.7 |
| A71G/D90G | | | | | | | | |
| H18Y/E35D/M47L/V68M/ | 1084 | 19892 | 14.6 | 2793 | 63.6 | 29944 | 686.8 | 10.7 |
| A71G/D90G | | | | | | | | |
| H18Y/A26E/M47L/V68M/ | 1085 | 121 | 0.1 | 2556 | 58.2 | 31716 | 727.4 | 12.4 |
| A71G/D90G | | | | | | | | |
| H18Y/A26E/E35D/V68M/ | 1086 | 23386 | 17.2 | 1757 | 40.0 | 28683 | 657.9 | 16.3 |
| A71G/D90G | | | | | | | | |
| H18Y/A26E/E35D/M47L/ | 1087 | 21215 | 15.6 | 1099 | 25.0 | 16926 | 388.2 | 15.4 |
| A71G/D90G | | | | | | | | |
| H18Y/A26E/E35D/M47L/ | 1088 | 24855 | 18.3 | 2675 | 60.9 | 25217 | 578.4 | 9.4 |
| V68M/D90G | | | | | | | | |
| H18Y/A26E/E35D/M47L/ | 1089 | 25404 | 18.7 | 526 | 12.0 | 28546 | 654.7 | 54.3 |
| V68M/A71G | | | | | | | | |
| E35D/M47L/V68M/A71G/ | 1090 | 26007 | 19.1 | 3072 | 70.0 | 29377 | 673.8 | 9.6 |
| D90G | | | | | | | | |
| H18Y/M47L/V68M/A71G/ | 1091 | 22235 | 16.4 | 3184 | 72.5 | 29517 | 677.0 | 9.3 |
| D90G | | | | | | | | |
| H18Y/A26E/V68M/A71G/ | 1092 | 18305 | 13.5 | 2683 | 61.1 | 27872 | 639.3 | 10.4 |
| D90G | | | | | | | | |
| H18Y/A26E/E35D/A71G/ | 1093 | −100 | −0.1 | 1075 | 24.5 | 14822 | 340.0 | 13.8 |
| D90G | | | | | | | | |
| H18Y/A26E/E35D/M47L/ | 1094 | 19736 | 14.5 | 1379 | 31.4 | 12698 | 291.2 | 9.2 |
| D90G | | | | | | | | |
| H18Y/A26E/E35D/M47L/ | 1095 | 20015 | 14.7 | 626 | 14.3 | 24683 | 566.1 | 39.4 |
| V68M | | | | | | | | |
| A26E/M47L/V68M/A71G/ | 1096 | 21807 | 16.0 | 2790 | 63.6 | 28139 | 645.4 | 10.1 |
| D90G | | | | | | | | |
| A26E/E35D/V68M/A71G/ | 1097 | 23286 | 17.1 | 2102 | 47.9 | 26510 | 608.0 | 12.6 |
| D90G | | | | | | | | |
| A26E/E35D/M47L/A71G/ | 1098 | 22127 | 16.3 | 1272 | 29.0 | 14550 | 333.7 | 11.4 |
| D90G | | | | | | | | |
| A26E/E35D/M47L/V68M/ | 1099 | 26698 | 19.6 | 2908 | 66.2 | 24978 | 572.9 | 8.6 |
| D90G | | | | | | | | |
| A26E/E35D/M47L/V68M/ | 1100 | 24587 | 18.1 | 417 | 9.5 | 27806 | 637.8 | 66.7 |
| A71G | | | | | | | | |
| H18Y/E35D/V68M/A71G/ | 1101 | 24335 | 17.9 | 2724 | 62.1 | 30088 | 690.1 | 11.0 |
| D90G | | | | | | | | |
| H18Y/E35D/M47L/A71G/ | 1102 | 22983 | 16.9 | 1273 | 29.0 | 13327 | 305.7 | 10.5 |
| D90G | | | | | | | | |
| H18Y/E35D/M47L/V68M/ | 1103 | 22834 | 16.8 | 3389 | 77.2 | 27410 | 628.7 | 8.1 |
| D90G | | | | | | | | |
| H18Y/E35D/M47L/V68M/ | 1104 | 23667 | 17.4 | 928 | 21.1 | 30377 | 696.7 | 32.7 |
| A71G | | | | | | | | |
| H18Y/A26E/M47L/A71G/ | 1105 | 25420 | 18.7 | 2047 | 46.6 | 17737 | 406.8 | 8.7 |
| D90G | | | | | | | | |
| H18Y/A26E/M47L/V68M/ | 1106 | 28649 | 21.1 | 32 | 0.7 | 23594 | 541.1 | 737.3 |
| D90G | | | | | | | | |
| H18Y/A26E/M47L/V68M/ | 1107 | 21742 | 16.0 | 544 | 12.4 | 29730 | 681.9 | 54.7 |
| A71G | | | | | | | | |
| H18Y/A26E/E35D/V68M/ | 1108 | 19331 | 14.2 | 2584 | 58.9 | 23206 | 532.2 | 9.0 |
| D90G | | | | | | | | |
| H18Y/A26E/E35D/V68M/ | 1109 | 19394 | 14.3 | 394 | 9.0 | 27476 | 630.2 | 69.7 |
| A71G | | | | | | | | |
| H18Y/A26E/E35D/M47L/ | 1110 | 19353 | 14.2 | 379 | 8.6 | 16887 | 387.3 | 44.6 |
| A71G | | | | | | | | |
| M47L/V68M/A71G/D90G | 1111 | 17418 | 12.8 | 3610 | 82.2 | 31114 | 713.6 | 8.6 |
| H18Y/V68M/A71G/D90G | 1112 | 22321 | 16.4 | 3414 | 77.8 | 30670 | 703.4 | 9.0 |
| H18Y/A26E/A71G/D90G | 1113 | 19878 | 14.6 | 2001 | 45.6 | 15491 | 355.3 | 7.7 |
| H18Y/A26E/E35D/D90G | 1114 | 22813 | 16.8 | 46.5 | 1.1 | 10019 | 229.8 | 215.5 |
| H18Y/A26E/E35D/M47L | 1115 | 23990 | 17.7 | 324 | 7.4 | 9951 | 228.2 | 30.7 |
| E35D/V68M/A71G/D90G | 1116 | 23290 | 17.1 | 2843 | 64.8 | 28005 | 642.3 | 9.9 |
| E35D/M47L/A71G/D90G | 1117 | 20921 | 15.4 | 1331 | 30.3 | 12073 | 276.9 | 9.1 |
| E35D/M47L/V68M/D90G | 1118 | 27607 | 20.3 | 3414 | 77.8 | 23482 | 538.6 | 6.9 |
| E35D/M47L/V68M/A71G | 1119 | 24656 | 18.1 | 806 | 18.4 | 27872 | 639.3 | 34.6 |
| A26E/V68M/A71G/D90G | 1120 | 8666 | 6.4 | 1194 | 27.2 | 3195 | 73.3 | 2.7 |
| A26E/M47L/A71G/D90G | 1121 | 21955 | 16.2 | 1955 | 44.5 | 13204 | 302.8 | 6.8 |
| A26E/M47L/V68M/D90G | 1122 | 21900 | 16.1 | 2583 | 58.8 | 10626 | 243.7 | 4.1 |
| A26E/M47L/V68M/A71G | 1123 | 3227 | 2.4 | 98.7 | 2.2 | 1667 | 38.2 | 16.9 |
| A26E/E35D/V68M/D90G | 1125 | 13879 | 10.2 | 1683 | 38.3 | 6987 | 160.3 | 4.2 |
| A26E/E35D/V68M/A71G | 1126 | 11791 | 8.7 | 135 | 3.1 | 12611 | 289.2 | 93.4 |
| A26E/E35D/M47L/D90G | 1127 | 18167 | 13.4 | 1550 | 35.3 | 9577 | 219.7 | 6.2 |
| A26E/E35D/M47L/A71G | 471 | 20645 | 15.2 | 236 | 5.4 | 11666 | 267.6 | 49.4 |
| H18Y/M47L/A71G/D90G | 1129 | 18162 | 13.4 | 1601 | 36.5 | 10796 | 247.6 | 6.7 |
| H18Y/M47L/V68M/D90G | 1130 | 19006 | 14.0 | 3795 | 86.4 | 21768 | 499.3 | 5.7 |
| H18Y/M47L/V68M/A71G | 1131 | 21298 | 15.7 | 1192 | 27.2 | 28478 | 653.2 | 23.9 |
| H18Y/E35D/A71G/D90G | 1132 | 25886 | 19.0 | 1310 | 29.8 | 8524 | 195.5 | 6.5 |
| H18Y/E35D/M47L/A71G | 1136 | 22368 | 16.5 | 604 | 13.8 | 11881 | 272.5 | 19.7 |
| H18Y/A26E/V68M/D90G | 1138 | 25794 | 19.0 | 2394 | 54.5 | 12845 | 294.6 | 5.4 |
| H18Y/A26E/V68M/A71G | 1139 | 11323 | 8.3 | 99.4 | 2.3 | 6866 | 157.5 | 69.1 |
| H18Y/A26E/M47L/D90G | 1140 | 23485 | 17.3 | 2858 | 65.1 | 8933 | 204.9 | 3.1 |
| H18Y/A26E/M47L/A71G | 1141 | 22108 | 16.3 | 611 | 13.9 | 15563 | 356.9 | 25.5 |
| H18Y/A26E/E35D/V68M | 1144 | 20929 | 15.4 | 372 | 8.5 | 17904 | 410.6 | 48.1 |
| H18Y/A26E/E35D/M47L/ | 491 | 18244 | 13.4 | 1836 | 41.8 | 29167 | 669.0 | 15.9 |
| V68M/A71G/D90G | | | | | | | | |
| CD80 WT IgV-Fc | 150 | 1359 | 1.0 | 43.9 | 1.0 | 43.6 | 1.0 | 1.0 |
| CD80 ECD-Fc | 2 | 19552 | 14.4 | 42.3 | 1.0 | 6377 | 146.3 | 150.8 |
| Fc Control | 1520 | 37.9 | 0.0 | 15.4 | 0.4 | 77.1 | 1.8 | 5.0 |

TABLE E21
Jurkat/IL2 + CHO/OKT3/PD-L1 Reporter Assay: Relative
Luciferase Units (RLU)

| | | | Fold Increase |
|---|---|---|---|
| | SEQ | CD80 | over |
| | ID | Conc | WT CD80- |
| Mutation(s) | NO | 5.0 nM | IgV-Fe |
| E35D | 198 | 368 | 3.2 |
| M47L | 1029 | 530 | 4.6 |
| V68M | 1030 | 130 | 1.1 |
| L85Q | 1031 | 132 | 1.1 |
| E35D/D46V | 1032 | 609 | 5.3 |
| E35D/M47L | 208 | 603 | 5.2 |
| D46V/M47L | 1035 | 773 | 6.7 |
| D46V/V68M | 1036 | 292 | 2.5 |
| D46V/L85Q | 1037 | 342 | 3.0 |
| M47L/L85Q | 1039 | 416 | 3.6 |
| V68M/L85Q | 1040 | 146 | 1.3 |
| E35D/D46V/M47L | 1041 | 746 | 6.5 |
| E35D/D46V/V68M | 1042 | 799 | 6.9 |
| E35D/D46V/L85Q | 1043 | 410 | 3.6 |
| E35D/M47L/V68M | 971 | 749 | 6.5 |
| E35D/M47L/L85Q | 418 | 177 | 1.5 |
| E35D/V68M/L85Q | 1044 | 511 | 4.4 |
| D46V/M47L/V68M | 1045 | 724 | 6.3 |
| D46V/M47L/L85Q | 1046 | 598 | 5.2 |
| D46V/V68M/L85Q | 1047 | 267 | 2.3 |
| M47L/V68M/L85Q | 1048 | 238 | 2.1 |
| E35D/D46V/M47L/V68M | 976 | 681 | 5.9 |
| E35D/D46V/M47L/L85Q | 1049 | 481 | 4.2 |
| E35D/D46V/V68M/L85Q | 1050 | 864 | 7.5 |
| E35D/M47L/V68M/L85Q | 1051 | 890 | 7.7 |
| D46V/M47L/V68M/L85Q | 1052 | 654 | 5.7 |
| E35D/D46V/M47L/V68M/L85Q | 975 | 712 | 6.2 |
| M47V | 1053 | 445 | 3.9 |
| N48K | 1054 | 160 | 1.4 |
| K89N | 1055 | 116 | 1.0 |
| E35D/M47V | 944 | 543 | 4.7 |
| E35D/N48K | 1056 | 590 | 5.1 |
| E35D/K89N | 1057 | 293 | 2.5 |
| M47V/N48K | 1058 | 490 | 4.3 |
| M47V/V68M | 1059 | 553 | 4.8 |
| M47V/K89N | 1060 | 312 | 2.7 |
| N48K/V68M | 1061 | 127 | 1.1 |
| N48K/K89N | 1062 | 127 | 1.1 |
| V68M/K89N | 1063 | 100 | 0.9 |
| E35D/M47V/N48K | 1064 | 561 | 4.9 |
| E35D/M47V/V68M | 1065 | 841 | 7.3 |
| E35D/M47V/K89N | 1066 | 668 | 5.8 |
| E35D/N48K/V68M | 1067 | 721 | 6.3 |
| E35D/N48K/K89N | 1068 | 719 | 6.3 |
| E35D/V68M/K89N | 1069 | 537 | 4.7 |
| M47V/N48K/V68M | 1070 | 664 | 5.8 |
| M47V/N48K/K89N | 1071 | 472 | 4.1 |
| M47V/V68M/K89N | 1072 | 862 | 7.5 |
| N48K/V68M/K89N | 1073 | 614 | 5.3 |
| E35D/M47V/N48K/V68M | 979 | 747 | 6.5 |
| E35D/M47V/N48K/K89N | 1074 | 814 | 7.1 |
| E35D/M47V/V68M/K89N | 1075 | 779 | 6.8 |
| E35D/N48K/V68M/K89N | 1076 | 772 | 6.7 |
| M47V/N48K/V68M/K89N | 1077 | 671 | 5.8 |
| E35D/D46V/M47V/N48K/V68M | 1078 | 696 | 6.1 |
| E35D/D46V/M47V/V68M/L85Q | 1079 | 980 | 8.5 |
| E35D/D46V/M47V/V68M/K89N | 1080 | 817 | 7.1 |
| E35D/M47V/N48K/V68M/L85Q | 1081 | 907 | 7.9 |
| E35D/M47V/N48K/V68M/K89N | 2250 | 767 | 6.7 |
| E35D/M47V/V68M/L85Q/K89N | 1082 | 854 | 7.4 |
| CD80 WT IgV-Fc | 150 | 115 | 1.0 |
| CD80 ECD-Fc | 465 | 131 | 1.1 |
| Fc Control | 1520 | 97 | 0.8 |

TABLE E22
Jurkat/IL2 + CHO/OKT3/PD-L1 Reporter Assay: Relative
Luciferase Units (RLU)

| | | | Fold Increase |
|---|---|---|---|
| | SEQ | CD80 | over WT |
| | ID | Conc | CD80- |
| Mutation(s) | NO | 5.0 nM | IgV-Fe |
| A26E/E35D/M47L/V68M/A71G/D90G | 1083 | 1117 | 2.86 |
| H18Y/E35D/M47L/V68M/A71G/D90G | 1084 | 1028 | 2.64 |
| H18Y/A26E/M47L/V68M/A71G/D90G | 1085 | 853 | 2.19 |
| H18Y/A26E/E35D/V68M/A71G/D90G | 1086 | 940 | 2.41 |
| H18Y/A26E/E35D/M47L/A71G/D90G | 1087 | 1015 | 2.60 |
| H18Y/A26E/E35D/M47L/V68M/D90G | 1088 | 893 | 2.29 |
| H18Y/A26E/E35D/M47L/V68M/A71G | 1089 | 976 | 2.50 |
| E35D/M47L/V68M/A71G/D90G | 1090 | 1041 | 2.67 |
| H18Y/M47L/V68M/A71G/D90G | 1091 | 986 | 2.53 |
| H18Y/A26E/V68M/A71G/D90G | 1092 | 974 | 2.50 |
| H18Y/A26E/E35D/A71G/D90G | 1093 | 956 | 2.45 |
| H18Y/A26E/E35D/M47L/D90G | 1094 | 925 | 2.37 |
| H18Y/A26E/E35D/M47L/V68M | 1095 | 895 | 2.29 |
| A26E/M47L/V68M/A71G/D90G | 1096 | 793 | 2.03 |
| A26E/E35D/V68M/A71G/D90G | 1097 | 912 | 2.34 |
| A26E/E35D/M47L/A71G/D90G | 1098 | 1132 | 2.90 |
| A26E/E35D/M47L/V68M/D90G | 1099 | 1091 | 2.80 |
| A26E/E35D/M47L/V68M/A71G | 1100 | 1010 | 2.59 |
| H18Y/E35D/V68M/A71G/D90G | 1101 | 815 | 2.09 |
| H18Y/E35D/M47L/A71G/D90G | 1102 | 851 | 2.18 |
| H18Y/E35D/M47L/V68M/D90G | 1103 | 852 | 2.18 |
| H18Y/E35D/M47L/V68M/A71G | 1104 | 853 | 2.19 |
| H18Y/A26E/M47L/A71G/D90G | 1105 | 1036 | 2.66 |
| H18Y/A26E/M47L/V68M/D90G | 1106 | 1075 | 2.76 |
| H18Y/A26E/M47L/V68M/A71G | 1107 | 1160 | 2.97 |
| H18Y/A26E/E35D/V68M/D90G | 1108 | 1049 | 2.69 |
| H18Y/A26E/E35D/V68M/A71G | 1109 | 961 | 2.46 |
| H18Y/A26E/E35D/M47L/A71G | 1110 | 944 | 2.42 |
| M47L/V68M/A71G/D90G | 1111 | 771 | 1.98 |
| H18Y/V68M/A71G/D90G | 1112 | 797 | 2.04 |
| H18Y/A26E/A71G/D90G | 1113 | 933 | 2.39 |
| H18Y/A26E/E35D/D90G | 1114 | 948 | 2.43 |
| H18Y/A26E/E35D/M47L | 1115 | 1208 | 3.10 |
| E35D/V68M/A71G/D90G | 1116 | 990 | 2.54 |
| E35D/M47L/A71G/D90G | 1117 | 784 | 2.01 |
| E35D/M47L/V68M/D90G | 1118 | 711 | 1.82 |
| E35D/M47L/V68M/A71G | 1119 | 745 | 1.91 |
| A26E/V68M/A71G/D90G | 1120 | 590 | 1.51 |
| A26E/M47L/A71G/D90G | 1121 | 827 | 2.12 |
| A26E/M47L/V68M/D90G | 1122 | 821 | 2.11 |
| A26E/M47L/V68M/A71G | 1123 | 517 | 1.33 |
| A26E/E35D/V68M/D90G | 1125 | 871 | 2.23 |
| A26E/E35D/V68M/A71G | 1126 | 839 | 2.15 |
| A26E/E35D/M47L/D90G | 1127 | 843 | 2.16 |
| A26E/E35D/M47L/A71G | 471 | 766 | 1.96 |
| H18Y/M47L/A71G/D90G | 1129 | 675 | 1.73 |
| H18Y/M47L/V68M/D90G | 1130 | 834 | 2.14 |
| H18Y/M47L/V68M/A71G | 1131 | 881 | 2.26 |
| H18Y/E35D/A71G/D90G | 1132 | 1487 | 3.81 |
| H18Y/E35D/M47L/A71G | 1136 | 1387 | 3.56 |
| H18Y/A26E/V68M/D90G | 1138 | 1131 | 2.90 |
| H18Y/A26E/V68M/A71G | 1139 | 469 | 1.20 |
| H18Y/A26E/M47L/D90G | 1140 | 1159 | 2.97 |
| H18Y/A26E/M47L/A71G | 1141 | 1107 | 2.84 |
| H18Y/A26E/E35D/V68M | 1144 | 1214 | 3.11 |
| CD80 WT IgV-Fc | 150 | 390 | 1.00 |

### Example 12

### Variant Optimization Via NNK Library Selection

[0879] Additional variant CD80 IgV domain-containing molecules were generated with combinations of mutations at positions 18, 26, 35, 47, 48, 68, 71, 85, 88, 90 and 93 with reference to positions set forth in SEQ ID NOs: 465, 491, and 495. The variants were generated from an NNK library at the selected positions, where N=A,G,C or T and K=T or G, such that the degenerate codons encode all potential amino acids, but prevent the encoding of two stop residues TAA and TGA. The NNK containing DNA was introduced into yeast substantially as described in Example 2 to generate yeast libraries. The libraries were used to select yeast expressing affinity modified variants of CD80 substantially as described in Example 3.

[0880] Outputs from three rounds of FACS selections with rhPD-L1-Fc substantially as described in Example 4 were further formatted, selected and expressed as inert Fc-fusion proteins substantially as described in Example 5. The Fc-fusion proteins were tested for binding, substantially as described in Example 7, and bioactivity, substantially described in Example 9. Binding and bioactivity of wild-type CD80 ECD-Fc (inert), wild-type CD80 IgV-Fc (inert), H18Y/A26E/E35D/M47L/V68M/A71G/D90G (SEQ ID NO: 491) CD80 IgV-Fc (inert), and inert Fc alone were also measured for reference. Results from the binding and activity studies are provided in Tables E23 and E24, respectively.

TABLE E23
Flow Binding to Jurkat (CD28) and CHO cells stably expressing CTLA4 or PD-L1

| | | CTLA4 | | CD28 | | PD-L1 | | |
|---|---|---|---|---|---|---|---|---|
| | | | Fold | | Fold | | Fold | |
| | | MFI | change | MFI | change | MFI | change | Ratio |
| | | at | to | at | to | at | to | of |
| | SEQ ID | 33.3 | WT | 33.3 | WT | 33.3 | WT | PDL1: |
| Mutation(s) | NO (IgV) | nM | CD80 | nM | CD80 | nM | CD80 | CD28 |
| H18Y/E35D/M47V/V68M/ | 1207 | 23650 | 17.1 | 3227 | 31.6 | 64919 | 393.4 | 20.1 |
| A71G | | | | | | | | |
| H18C/A26P/E35D/M47L/ | 1208 | 23371 | 16.9 | 1906 | 18.7 | 67010 | 406.1 | 35.2 |
| V68M/A71G | | | | | | | | |
| H18I/A26P/E35D/M47V/ | 1209 | 21923 | 15.8 | 2573 | 25.2 | 64919 | 393.4 | 25.2 |
| V68M/A71G | | | | | | | | |
| H18L/A26N/D46E/V68M/ | 1210 | 17045 | 12.3 | 7253 | 71.1 | 67999 | 412.1 | 9.4 |
| A71G/D90G | | | | | | | | |
| H18L/E35D/M47V/V68M/ | 1211 | 20280 | 14.7 | 6349 | 62.2 | 64761 | 392.5 | 10.2 |
| A71G/D90G | | | | | | | | |
| H18T/A26N/E35D/M47L/ | 1212 | 20911 | 15.1 | 1366 | 13.4 | 68498 | 415.1 | 50.1 |
| V68M/A71G | | | | | | | | |
| H18V/A26K/E35D/M47L/ | 1213 | 22932 | 16.6 | 3641 | 35.7 | 67338 | 408.1 | 18.5 |
| V68M/A71G | | | | | | | | |
| H18V/A26N/E35D/M47V/ | 1214 | 22395 | 16.2 | 1297 | 12.7 | 68165 | 413.1 | 52.6 |
| V68M/A71G | | | | | | | | |
| H18V/A26P/E35D/M47V/ | 1215 | 13669 | 9.9 | 2253 | 22.1 | 55417 | 335.9 | 24.6 |
| V68L/A71G | | | | | | | | |
| H18V/A26P/E35D/M47L/ | 1216 | 16192 | 11.7 | 2452 | 24.0 | 52405 | 317.6 | 21.4 |
| V68M/A71G | | | | | | | | |
| H18V/E35D/M47V/V68M/ | 1217 | 16769 | 12.1 | 2115 | 20.7 | 43588 | 264.2 | 20.6 |
| A71G/D90G | | | | | | | | |
| H18Y/A26P/E35D/M471/ | 1218 | 12156 | 8.8 | 5125 | 50.2 | 54482 | 330.2 | 10.6 |
| V68M/A71G | | | | | | | | |
| H18Y/A26P/E35D/M47V/ | 1219 | 17904 | 12.9 | 6911 | 67.8 | 51521 | 312.2 | 7.5 |
| V68M/A71G | | | | | | | | |
| H18Y/E35D/M47V/V68L/ | 1220 | 16458 | 11.9 | 2549 | 25.0 | 47905 | 290.3 | 18.8 |
| A71G/D90G | | | | | | | | |
| H18Y/E35D/M47V/V68M/ | 1221 | 17165 | 12.4 | 6792 | 66.6 | 52151 | 316.1 | 7.7 |
| A71G/D90G | | | | | | | | |
| A26P/E35D/M47I/V68M/ | 1222 | 19761 | 14.3 | 8189 | 80.3 | 54747 | 331.8 | 6.7 |
| A71G/D90G | | | | | | | | |
| H18V/A26G/E35D/M47V/ | 1223 | 25398 | 18.4 | 8189 | 80.3 | 66198 | 401.2 | 8.1 |
| V68M/A71G/D90G | | | | | | | | |
| H18V/A26S/E35D/M47L/ | 1224 | 24919 | 18.0 | 8063 | 79.0 | 73884 | 447.8 | 9.2 |
| V68M/A71G/D90G | | | | | | | | |
| H18V/A26R/E35D/M47L/ | 1225 | 23151 | 16.7 | 9620 | 94.3 | 73166 | 443.4 | 7.6 |
| V68M/A71G/D90G | | | | | | | | |
| H18V/A26D/E35D/M47V/ | 1226 | 22132 | 16.0 | 6253 | 61.3 | 67503 | 409.1 | 10.8 |
| V68M/A71G/D90G | | | | | | | | |
| H18V/A26Q/E35D/M47V/ | 1227 | 17654 | 12.8 | 3126 | 30.6 | 33597 | 203.6 | 10.7 |
| V68L/A71G/D90G | | | | | | | | |
| H18A/A26P/E35D/M47L/ | 1228 | 23763 | 17.2 | 4731 | 46.4 | 33436 | 202.6 | 7.1 |
| V68M/A71G/D90G | | | | | | | | |
| H18A/A26N/E35D/M47L/ | 1229 | 21360 | 15.4 | 4913 | 48.2 | 36284 | 219.9 | 7.4 |
| V68M/A71G/D90G | | | | | | | | |
| H18F/A26P/E35D/M47I/ | 1230 | 23932 | 17.3 | 4801 | 47.1 | 32253 | 195.5 | 6.7 |
| V68M/A71G/D90G | | | | | | | | |
| H18F/A26H/E35D/M47L/ | 1231 | 16420 | 11.9 | 8392 | 82.3 | 20666 | 125.2 | 2.5 |
| V68M/A71G/D90G | | | | | | | | |
| H18F/A26N/E35D/M47V/ | 1232 | 15206 | 11.0 | 3170 | 31.1 | 22395 | 135.7 | 7.1 |
| V68M/A71G/D90K | | | | | | | | |
| H18Y/A26N/E35D/M47F/ | 1233 | 14618 | 10.6 | 82.2 | 0.8 | 26510 | 160.7 | 322.5 |
| V68M/A71G/D90G | | | | | | | | |
| H18Y/A26P/E35D/M47Y/ | 1234 | 8281 | 6.0 | 1818 | 17.8 | 27280 | 165.3 | 15.0 |
| V68I/A71G/D90G | | | | | | | | |
| H18Y/A26Q/E35D/M47T/ | 1235 | 16652 | 12.0 | 6733 | 66.0 | 24450 | 148.2 | 3.6 |
| V68M/A71G/D90G | | | | | | | | |
| H18R/A26P/E35D/D46N/ | 1236 | 17327 | 12.5 | 18589 | 182.2 | 29306 | 177.6 | 1.6 |
| M47V/V68M/A71G/D90P | | | | | | | | |
| H18F/A26D/E35D/D46E/ | 1237 | 17205 | 12.4 | 6028 | 59.1 | 27541 | 166.9 | 4.6 |
| M47T/V68M/A71G/D90G | | | | | | | | |
| H18Y/A26E/E35D/M47L/ | 491 | 21512 | 15.5 | 5202 | 51.0 | 35251 | 213.6 | 6.8 |
| V68M/A71G/D90G | | | | | | | | |
| CD80 WT IgV-Fc | | 1384 | 1.0 | 102 | 1.0 | 165 | 1.0 | 1.6 |
| CD80 WT ECD-Fc | | 17862 | 12.9 | 57.8 | 0.6 | 161 | 1.0 | 2.8 |
| Fc Control | | 194 | 0.1 | 81 | 0.8 | 185 | 1.1 | 2.3 |

TABLE E24
Jurkat/IL2 + CHO/OKT3/PD-L1 Reporter Assay: Relative
Luciferase Units (RLU)

| | | | Fold |
|---|---|---|---|
| | | | Increase |
| | SEQ | CD80 | over WT |
| | ID | Conc | CD80- |
| CD80 Mutation(s) | NO: | 5.0 nM | IgV-Fe |
| H18Y/E35D/M47V/V68M/A71G | 1207 | 963 | 5.6 |
| H18C/A26P/E35D/M47L/V68M/A71G | 1208 | 936 | 5.5 |
| H181/A26P/E35D/M47V/V68M/A71G | 1209 | 916 | 5.4 |
| H18L/A26N/D46E/V68M/A71G/D90G | 1210 | 815 | 4.8 |
| H18L/E35D/M47V/V68M/A71G/D90G | 1211 | 910 | 5.3 |
| H18T/A26N/E35D/M47L/V68M/A71G | 1212 | 1053 | 6.2 |
| H18V/A26K/E35D/M47L/V68M/A71G | 1213 | 957 | 5.6 |
| H18V/A26N/E35D/M47V/V68M/A71G | 1214 | 985 | 5.8 |
| H18V/A26P/E35D/M47V/V68L/A71G | 1215 | 881 | 5.2 |
| H18V/A26P/E35D/M47L/V68M/A71G | 1216 | 808 | 4.7 |
| H18V/E35D/M47V/V68M/A71G/D90G | 1217 | 854 | 5.0 |
| H18Y/A26P/E35D/M47T/V68M/A71G | 1218 | 761 | 4.5 |
| H18Y/A26P/E35D/M47V/V68M/A71G | 1219 | 821 | 4.8 |
| H18Y/E35D/M47V/V68L/A71G/D90G | 1220 | 862 | 5.0 |
| H18Y/E35D/M47V/V68M/A71G/D90G | 1221 | 825 | 4.8 |
| A26P/E35D/M47I/V68M/A71G/D90G | 1222 | 823 | 4.8 |
| H18V/A26G/E35D/M47V/V68M/A71G/D90G | 1223 | 907 | 5.3 |
| H18V/A26S/E35D/M47L/V68M/A71G/D90G | 1224 | 883 | 5.2 |
| H18V/A26R/E35D/M47L/V68M/A71G/D90G | 1225 | 738 | 4.3 |
| H18V/A26D/E35D/M47V/V68M/A71G/D90G | 1226 | 771 | 4.5 |
| H18V/A26Q/E35D/M47V/V68L/A71G/D90G | 1227 | 795 | 4.6 |
| H18A/A26P/E35D/M47L/V68M/A71G/D90G | 1228 | 857 | 5.0 |
| H18A/A26N/E35D/M47L/V68M/A71G/D90G | 1229 | 1054 | 6.2 |
| H18F/A26P/E35D/M47I/V68M/A71G/D90G | 1230 | 926 | 5.4 |
| H18F/A26H/E35D/M47L/V68M/A71G/D90G | 1231 | 907 | 5.3 |
| H18F/A26N/E35D/M47V/V68M/A71G/D90K | 1232 | 919 | 5.4 |
| H18Y/A26N/E35D/M47F/V68M/A71G/D90G | 1233 | 911 | 5.3 |
| H18Y/A26P/E35D/M47Y/V68I/A71G/D90G | 1234 | 865 | 5.1 |
| H18Y/A26Q/E35D/M47T/V68M/A71G/D90G | 1235 | 994 | 5.8 |
| H18R/A26P/E35D/D46N/M47V/V68M/ | 1236 | 972 | 5.7 |
| A71G/D90P | | | |
| H18F/A26D/E35D/D46E/M47T/V68M/ | 1237 | 833 | 4.9 |
| A71G/D90G | | | |
| H18Y/A26E/E35D/M47L/V68M/A71G/D90G | 491 | 912 | 5.3 |
| CD80 WT IgV-Fc | 150 | 171 | 1.0 |
| CD80 WT ECD-Fc | 2 | 159 | 0.9 |
| Fc Control | 1520 | 129 | 0.8 |

### Example 13

### CD80 IgV-Fc Linker Variants

[0881] CD80 IgV-Fc variants were constructed with different linking regions (linkers) between the IgV and Fc domains and binding and/or bioactivity was assessed. Fusion proteins, containing CD80 E35D/M47V/N48K/V68M/K89N IgV-Fc and E35D/D46V/M47L/V68M/L85Q/E88D IgV-Fc proteins, were generated containing EAAAK (SEQ ID NO: 1241), (EAAAK)₃ (SEQ ID NO: 1242), GS(G₄S)₃ (SEQ ID NO: 1243), GS(G₄S)₅ (SEQ ID NO: 1244) linkers.

[0882] CD80 IgV-Fc proteins were also generated that contained the E35D/M47V/N48K/V68M/K89N or E35D/D46V/M47L/V68M/L85Q/E88D modifications in a CD80 IgV backbone sequence that was deleted for three amino acids that connect the IgV to IgC in wildtype CD80 (backbone sequence set forth in SEQ ID NO: 1245). The generated variant CD80 IgV was then fused to an inert Fc that was additionally lacking 6 amino acids of the binge region (Fc set forth in SEQ ID NO: 1240). Molecules generated by this strategy were fused directly to the Fc with no additional linker, designated as “delta” linker.

[0883] The CD80-IgV-Fc variants were then tested for binding and bioactivity as described in Examples 7 and 9. Binding and bioactivity of wild-type CD80 IgV (SEQ ID NO: 150)-Fc (inert), CD80 ECD (SEQ ID NO:2)-Fc (inert), containing a GSG₄S linker (SEQ ID NO: 1522) and inert Fc alone were also measured for comparison. The results are provided in Tables E25 and E26, respectively.

TABLE E25
Flow Binding to Jurkats (CD28) and CHO cells stably expressing CTLA4 or PD-L1

| | | CTLA4 | | CD28 | | PD-L1 | | |
|---|---|---|---|---|---|---|---|---|
| | | | Fold | | Fold | | Fold | |
| | | | change | | change | | change | |
| | | | to | | to | | to | Ratio of |
| | | MFI at | WT | MFI at | WT | MFI at | WT | PDL1: |
| Mutation(s) | linker | 33.3 nM | CD80 | 33.3 nM | CD80 | 33.3 nM | CD80 | CD28 |
| E35D/M47V/N48K/ | delta | 3091 | 2.6 | 4678 | 83.7 | 20442 | 438.7 | 4 |
| V68M/K89N | EAAAK | 27516 | 23.0 | 2634 | 47.1 | 22862 | 490.6 | 9 |
| | (EAAAK)₃ | 27132 | 22.6 | 1285 | 23.0 | 24476 | 525.2 | 19 |
| | GS(G₄S)₃ | 29793 | 24.9 | 2109 | 37.7 | 24222 | 519.8 | 11 |
| | GS(G4S)₅ | 26994 | 22.5 | 1154 | 20.6 | 22707 | 487.3 | 20 |
| E35D/D46V/M47L/ | delta | 12177 | 10.2 | 4173 | 74.7 | 22538 | 483.6 | 5 |
| V68M/L85Q/E88D | EAAAK | 28959 | 24.2 | 563 | 10.1 | 24821 | 532.6 | 44 |
| | (EAAAK)₃ | 32048 | 26.8 | 197 | 3.5 | 25461 | 546.4 | 129 |
| | GS(G₄S)₃ | 26961 | 22.5 | 267 | 4.8 | 22596 | 484.9 | 85 |
| | GS(G₄S)₅ | 26607 | 22.2 | 143 | 2.6 | 22408 | 480.9 | 157 |
| CD80 WT IgV-Fc | GSG₄S | 1198 | 1.0 | 56 | 1.0 | 47 | 1.0 | 1 |
| CD80 ECD-Fc | GSG₄S | 32735 | 27.3 | 37 | 0.7 | 35 | 0.7 | 1 |
| Inert Fc (control) | N/A | 40 | 0.0 | 20 | 0.3 | 58 | 1.2 | 3 |

TABLE E26
Jurkat/IL2 + CHO/OKT3/PD-L1 Reporter Assay: Relative Luciferase
Units (RLU)

| | | | Fold |
|---|---|---|---|
| | | CD80 | Increase |
| | | Conc | over WT |
| Mutation(s) | linker | 5.0 nM | CD80-IgV-Fe |
| E35D/M47V/N48K/V68M/K89N | delta | 1026 | 2.63 |
| | EAAAK | 1707 | 4.38 |
| | (EAAAK)₃ | 1761 | 4.52 |
| | GS(G₄S)₃ | 1400 | 3.59 |
| | GS(G4S)₅ | 1541 | 3.95 |
| E35D/D46V/M47L/V68M/L85Q/ | delta | 1079 | 2.77 |
| E88D | EAAAK | 1462 | 3.75 |
| | (EAAAK)₃ | 2046 | 5.25 |
| | GS(G₄S)₃ | 1592 | 4.08 |
| | GS(G4S)₅ | 2053 | 5.26 |
| CD80 WT IgV-Fc | GSG₄S | 390 | 1.00 |

### Example 14

### Assessment of Bioactivity of Affinity-Matured CD80 IgSF Domain-Containing Molecules Using a T Cell Stimulation Assay

[0884] CD80-IgV-Fc molecules, containing either an inert Fc or effector Fc, were tested at 3 concentrations, 1 nM, 10 nM and 100 nM, for their ability to stimulate T cells in the presence of artificial antigen presenting cells (aAPCs), K562/OKT3+/−PD-L1, as determined by cytokine release (IFN-gamma and IL-2) and T cell proliferation.

[0885] 100,000 isolated Pan T cells were incubated with 8,000 K562/OKT3 or K562/OTK3/PD-L1 cells (12.5:1 ratio) and 1 nM, 10 nM, or 100 nM CD80-IgV-Fc (effector) or CD80-IgV-Fc (inert). The cell mixture was also incubated with an anti-PD-L1 antibody, wild-type human IgG1, human IgG1 Fc (inert), wild-type CD80 IgV-Fc (effector), wild-type CD80 IgV-Fc (inert), wild-type CD80 ECD-Fc (inert), wild-type CD80 ECD-Fc (effector), or no treatment as controls. IFN-gamma, IL-2 and proliferation were determined after 72 hr. incubation.

[0886] Results for IL-2 release are set forth in Table E27. In the first experiment, co-culture of T cells and K562/OKT3 aAPC (not expressing PD-L11), in the presence of certain exemplary assessed variant CD80 IgV-Fc (effector) molecules, resulted in increased IL-2 production. In a second experiment, CD28 costimulation was increased in the presence of certain variant CD80 IgV-Fc (inert) molecules upon co-culture of T cells with K562/OKT3/PD-L1 aAPCs, consistent with PD-L1-dependent CD28 costimulation activity for these variants. CD80 IgV-Fc molecules that poorly bind PD-L1 (i.e. E35G/KA717ED/L72P) did not generate significant costimulation and IL-2 production. In some cases, certain variant CD8 IgV-Fc (effector) molecules, like E35D, were capable of effecting CD28 costimulation only in the presence of PD-L1-expressing aAPC. IFN-gamma and proliferation results were similar to those observed for IL-2 release.

TABLE E27
Primary T Cell CD28 Costimulation via Fc Receptor- or PD-L1-Mediated Cross-
Linking of CD80-IgC-Fc Molecules

| | SEQ | K562/OKT3 (No PD-L1) | | | K562/OKT3/PD-L1 | | |
|---|---|---|---|---|---|---|---|
| | ID NO | CD80-IgV Fc (effector) | | | CD80-IgV Fc (inert) | | |
| CD80 Mutation(s) | (IgV) | 1 nM | 10 nM | 100 nM | 1 nM | 10 nM | 100 nM |
| E35D/M47I | 177 | 11140 | 21590 | 27162 | 244 | 3432 | 8313 |
| A71D/L72V/E95K | 192 | 10593 | 15145 | 21314 | <LOD | <LOD | <LOD |
| E35D | 198 | 7598 | 7988 | 8380 | <LOD | 210 | 2739 |
| E35D/M47I/L70M | 199 | 15695 | 25997 | 25294 | 311 | 6982 | 8393 |
| E35D/M43L/L70M | 201 | 8025 | 7712 | 10496 | <LOD | 52 | 1204 |
| E35D/D46V/L85Q | 203 | 14329 | 21462 | 25421 | <LOD | 102 | 1429 |
| H18Y/A26T/E35D/A71D/L85Q | 207 | 11960 | 20452 | 20581 | <LOD | <LOD | <LOD |
| E35D/M47L | 208 | 14571 | 23581 | 26827 | 268 | 2695 | 7533 |
| E23G/A26S/E35D/T62N/A71D/ | 216 | 15377 | 23462 | 27028 | <LOD | <LOD | 102 |
| L72V/L85M | | | | | | | |
| E35G/K54E/A71D/L72P | 219 | 7032 | 7902 | 8886 | <LOD | <LOD | 59 |
| A26E/E35D/M47L/L85Q | 221 | 6847 | 8318 | 10113 | 72 | 268 | 1455 |
| WT CD80 IgV-Fc (effector) | 150 | 7167 | 7123 | 6203 | Not | Not | Not |
| | | | | | Tested | Tested | Tested |
| WT CD80 IgV-Fc (inert) | 150 | Not | Not | Not | <LOD | 7 | 52 |
| | | Tested | Tested | Tested | | | |
| WT CD80 ECD-Fc (inert) | 2 | 8046 | 7022 | 6481 | Not | Not | Not |
| | (ECD) | | | | Tested | Tested | Tested |
| WT CD80 ECD-Fc (effector) | 2 | 11434 | 20185 | 23118 | 507 | 3114 | 8393 |
| | (ECD) | | | | | | |
| Anti-PD-L1 mAb | | 8220 | 8621 | 6903 | 461 | 821 | 1045 |
| Inert Fc Control | | 7040 | 6335 | 5512 | <LOD | 143 | <LOD |
| WT IgG1 Fc Control | — | 7077 | 6916 | 6258 | Not | Not | Not |
| | | | | | Tested | Tested | Tested |

### Example 15

### Assessment of Variant CD80 Polypeptides Blocking PD-L1/PD-1 Interaction or PD-L1-Dependent Costimulation

[0887] A. PD-L1/PD-1 Binding and Blocking

[0888] Binding of selected immunomodulatory fusion proteins to cells expressing PD-L1 was assessed to test for blocking of the PD-L1/PD-1 interaction. CHO/PD-L1 cells were stained with a titration of variant CD80 IgV-Fc domain-containing molecules, washed and then incubated with fluorescently conjugated PD-1-Fc. Exemplary variant CD80 IgV domain-containing molecules tested contained E35D/M47V/N48K/V68M/K89N (SEQ ID NO: 465), H18Y/V22A/E35D/M47V/T62S/A71G (SEQ ID NO: 490), H18Y/A26E/E35D/M47L/V68M/A71G/D90G (SEQ ID NO: 491), and E35D/D46V/M47L/V68M/L85Q/E88D (SEQ ID NO: 495). As a control, an anti-PD-L1 antibody and a wild-type CD80 IgV-Fc were also assessed. Samples were acquired on a flow cytometer and MFIs of the fluorescently labeled PD-1 were determined by Flowjo software analysis. As shown in FIG. 7, the exemplary variant CD80 IgV-Fc molecules tested were shown to antagonize or block binding of PD-1 to PD-L1.

[0889] B. Activity

[0890] Exemplary variant CD80-Fc polypeptides were assessed for their ability to deliver PD-L1 dependent costimulation using Jurkat/IL-2 reporter cells, expressing PD-1, as described above. The Jurkat/IL-2 reporter cells were incubated with K562/OKT3/PD-L1 artificial antigen presenting cells (aAPCs), described above, in the presence of titrated amounts (ranging from 40 pM to 100 nM) of exemplary variant CD80 IgV-Fc polypeptides. Among the exemplary variant CD80 IgV-Fc polypeptides were molecules containing a variant IgV, either E35D/M47V/N48K/V68M/K89N (SEQ ID NO: 465), H18Y/V22A/E35D/M47V/T62S/A71G (SEQ ID NO:490), H18Y/A26E/E35D/M47L/V68M/A71G/D90G (SEQ IN NO: 491), or E35D/D46V/M47L/V68M/L85Q/E88D (SEQ ID NO:495), fused to the exemplary Fc (C220S/L234A/L235E/G237A by EU numbering; SEQ ID NO: 1520), or allotypes thereof. Other tested variant CD80 IgV-Fc polypeptides contained a variant IgV, either E35D/M47I/L70M, SEQ ID NO:199; or E35D/M47L, SEQ ID NO:208) fused to wild-type IgG1 (SEQ ID NO: 1517). As a control, PD-L1-expressing cells were also incubated with wild-Type CD80 IgV-Fc (SEQ ID NO:150) or with an anti-PDL1 antibody (BioLegend USA).

[0891] Jurkat/IL-2/PD-1 reporter cells were plated at 100,000 cells per well in Jurkat Assay buffer (RPMI1640+5% FBS). The Jurkat cells were then incubated with test or control proteins for 15 minutes at room temperature. K562/OKT3/PD-L1 cells were then added such that each well had a final ratio of 5:1 Jurkat: K562 cells. Jurkat cells, K562 cells, and test or control proteins were incubated for 5 hours at 37 degrees Celsius in a humidified 5% CO₂ incubation chamber. Plates were then removed from the incubator and acclimated to room temperature for 15 minutes. 100 μL of a cell lysis and luciferase substrate solution (BioGlo luciferase reagent, Promega) were added to each well and the plates were incubated on an orbital shaker for 10 minutes. Luminescence was measured with a 1 second per well integration time using a BioTek Cytation luminometer, and a fold increase in luminescence value (RLU) was determined for each test sample.

[0892] As shown in FIG. 8, the addition of the exemplary assessed variant CD80 IgV-Fc, blocked PD-L1 mediated suppression of the TCR activation and/or agonized CD28, resulting in increased luminescence. Variant molecules identified for increased binding affinity to PD-L1 exhibited greater activity in agonizing T cell activation.

### Example 16

### In Vivo Anti-Tumor Activity of Variant CD80 Polypeptides

[0893] A. Anti-Tumor Activity of CD80 Variants

[0894] Mouse MC38 tumor cells were stably transfected with human PD-L1 (MC38 hPD-L1) and implanted subcutaneously into C57BU6 mice. An inert Fc control or exemplary variant CD80 IgV-Fc molecules, containing a variant IgV (E35D/M47I/L70M, SEQ ID NO:199; or E35D/M47L, SEQ ID NO:208) fused to either an inert Fc molecule (e.g. SEQ ID NO: 1520, or allotypes thereof) or an Fc molecule capable of mediating effector activity (SEQ ID NO:1517), were injected i.p., 100 μg/mouse, on days 8, 10, 13, 15 and 17 post-implantation. Tumor volume was tracked over time.

[0895] As shown in FIG. 9, suppression of tumor growth was observed in all mice treated with CD80-IgV compared to the Fc control, demonstrating that the variant CD80 IgV-Fc molecules were functionally active in vivo.

[0896] B. Dose Dependency of Anti-Tumor Activity

[0897] 1. Tumor Volume (50 ug, 100 ug, and 500 ug Doses)

[0898] 70 female C57CL/6 mice, containing similar tumor volumes of approximately 50-51 mm³, following implantation of MC38 hPD-L1 tumor cells, were staged and divided into 5 treatment groups containing 14 mice each. Group 1 (isotype control) received 75 μg Fc only (SEQ ID NO: 1520); Groups 2, 3 and 4 received 50, 100, and 500 μg, respectively, CD80 variant E35D/M47L (SEQ ID NO: 208) fused to an inert human Fc (SEQ ID NO: 1520, or allotypes thereof) via a GSG₄S linker (SEQ ID NO: 1522); and Group 5 received 100 μg human anti-PD-L1 mAb (durvalumab), on days 8, 10, and 12. Tumor volumes were measured on days 7, 10, and 12. On day 13, 5 animals were sacrificed for analysis as described in the sections below. Tumor measurements resumed for the remaining 9 mice for each group on days 17, 20 and 27. On days 26, 28, and 31, the animals in Group 1 (Fc isotype control) received an intratumoral injection of 100 μg E35D/M47L CD80-IgV-Fc.

[0899] The median and mean tumor volumes are depicted in FIG. 10. As shown, a dose-dependent decrease in tumor volumes were observed in treated with CD80-IgV-Fc compared to the Fc control. In this study, the median tumor volume observed in mice treated with the 100 μg to 500 μg CD80-IgV-Fc was similar to mice treated with the anti-PD-L1 antibody control.

[0900] Cytokine Analysis

[0901] Following the enzymatic digestion of MC38 tumors, the lysate solution was centrifuged, and the supernatants collected and stored at −80° C. until ready for assay. The concentration of mouse IFNγ in each sample was then measured using a commercial ELISA kit (R&D Systems, Inc.) according to manufacturer's instructions, and concentrations were normalized based on either tumor weight or total cell number isolated from tumor. Results, set forth in FIG. 11, indicated that the highest dose (500 μg) of E35D/M47L CD80-IgV-Fc resulted in the highest concentrations of IFNγ in the tumor lysates, suggesting that the CD80-IgV-Fc is producing IFNγ as a result of its treatment, a mechanism that is known to promote anti-tumor immunity.

[0902] C. Anti-Tumor and Rechallenge Activity of CD80 Selected Variants

[0903] 95 female C57BU6 mice were implanted with MC38 hPD-L1 tumor cells. The tumors were staged on Day 7, and 77 mice with similar tumor volumes of approximately 60 mm³ were divided into 7 treatment groups containing 11 mice each. Group 1 (Isotype control) received 75 μg inert Fc only (SEQ ID NO: 1520); Group 2 received 100 μg CD80 variant E35D/M47V/N48K/V68M/K89N IgV (SEQ ID NO: 465)-Fc (inert); Group 3 received 100 μg CD80 variant H18Y/A26E/E35D/M47L/V68M/A71G/D90G IgV (SEQ ID NO: 491)-Fc (inert); Group 4 received 100 pg CD80 variant E35D/D46V/M47U/V68M/L85Q/E88D IgV (SEQ ID NO: 495)-Fc (inert); Group 5 received 100 μg CD80 variant E35D/D46E/M47V/V68M/D90G/K93E IgV (SEQ ID NO: 499)-Fc (inert); Group 6 received 100 μg CD80 variant E35D/M47L (SEQ ID NO: 208)-Fc (inert); and Group 7 received 100 μg human anti-PD-L1 mAb (durvalumab), on days 7, 9 and 11. For the variant CD80-IgV-Fc molecules, the CD80IgV domains were fused to inert human Fc, such as set forth in SEQ ID NO: 1520, or allotypes thereof, via a GSG₄S linker (SEQ ID NO: 1522. Tumor volumes were measured on days 14, 17, 21, 24, 28, 31, and 37. Animals receiving the Fc isotype control were terminated by day 28 due to excess tumor burden.

[0904] The median and mean tumor volumes are depicted in FIG. 12, which shows that all tested CD80-IgV-Fc molecules exhibited similar or, in some cases, substantially improved activity compared to the anti-PD-L1 control. Upon completion of the study, 8 mice from Group 3, 2 mice from Group 4, 1 mouse from Group 6, and 2 mice from Group 7 no longer had detectable tumors and were designated “tumor-free.”

[0905] On day 49, tumor-free mice, from Groups 3, 4, 6, and 7, and 2 naïve C57CL/6 mice were re-challenged with an additional injection of hPD-L1 MC38 cells. Tumor volumes were measured on days 56, 59, and 63. The results are depicted in FIG. 13. Naïve mice exhibited rapid tumor growth, as expected. At day 59, 8/8 mice from Group 3, 1/2 mice from Group 4, 1/1 mouse from Group 6, and 2/2 mice from Group 7 were tumor-free, and by day 63, all mice in Group 3, Group 4, Group 6, and Group 7 were tumor-free. This result is consistent with an observation that the tested agents, including CD80-IgV-Fc molecules, were able to provide long-lasting, durable immunity, anti-tumor effects.

[0906] Tumors from mice sacrificed 3 days after the second dose were digested and live CD45-tumor cells were analyzed for the presence of bound inert Fc, CD80 variant-Fc, and anti-PD-L1 antibody by flow cytometry. The results for Groups 1, 3, 6 and 7 are provided in FIG. 14. Similar to the study described above, the results showed that the CD80-IgV-Fc molecules exhibited less binding to the tumor compared to the anti-PD-L1 antibody control. Despite this, superior activity by CD80-IgV-Fc, such as shown by mice treated with the exemplary CD80-IgV-Fc set forth in SEQ ID NO: 491 (H18Y/A26E/E35D/M47L/V68M/A71G/D90G), could be achieved consistent with the differentiating factor in activity being due to CD28 agonism (PD-L1-dependent CD28 costimulation) and/or CTLA-4 antagonism.

[0907] D. Anti-Tumor Activity of CD80 Variant and Anti-PD-L1 Antibody

[0908] 75 animals were staged into 3 treatment groups 7 days after implantation with hPD-L1 MC38 tumor cells. Group 1 received 3 injections of 75 μg inert Fc (SEQ ID NO: 1520), Group 2 received 3 injections of 100 μg CD80 variant H18Y/A26E/E35D/M47L/V68M/A71G/D90G IgV (SEQ ID NO: 491)-Fc (inert), and Group 3 received 3 injections of 100 μg of human anti-PD-L1 mAb (durvalumab), with the injections taking place on Days 8, 10 and 12 after implantation. Tumor volumes were measured every 3-4 days, from Day 11 until Day 35. 3 days after the 1^{st} dose, 2^{nd} dose and 3^{rd} dose, 4 mice from each group were sacrificed for tumor and LN analyses, leaving 13 mice for tumor volume measurements throughout the study period.

[0909] FIG. 15 shows a greater decrease in the median and mean tumor volumes of mice treated in this study with the exemplary CD80-IgV-Fc compared to the anti-PD-L1 control. On Day 18, 0/13 mice of Group 1 (Fc control-treated) were tumor-free, 6/13 mice of Group 2 (CD80 variant IgV-Fc-treated) were tumor-free, and 3/13 mice of Group 3 (durvalumab-treated) were tumor-free. At day 35, 1/13, 6/13, and 3/13 mice were tumor free in Groups 1, 2, and 3, respectively. Mice treated with the variant CD80-IgV-Fc exhibited tumors that on average were reduced in size compared to tumors of mice treated with anti-hPD-L1 antibody or the inert Fc control.

[0910] Tumor Cell Characterization

[0911] Three days following the 2nd dose of the Fc control, the CD80 variant IgV-Fc, and anti-PD-L1 antibody (durvalumab), tumors and draining lymph nodes (LN) were harvested from 34 mice from each treatment group. Tissues were processed to single cell suspensions (tumors were enzymatically digested as a part of the processing, whereas draining LN were not), and subjected to multi-color flow cytometric analysis of CD8+ T cells on the CD45+ cell subset (immune cells in either the LN or tumor), as well as % hIgG+ staining on the CD45− cell subset (tumor cells) to detect molecules (CD80-IgV-Fc or anti-PD-L1) bound to the tumor cells. The results are provided in FIG. 16A-C.

[0912] The percentages of CD8+ T cells were significantly greater (p<0.05 or p<0.01) in both the TIL and the LN for mice treated with H18Y/A26E/E35D/M47L/V68M/A71G/D90G CD80-IgV-Fc as compared to the Fc control or the anti-PD-L1 antibody treatments (FIGS. 16A (LN) and 16B (tumor). This indicates that H18Y/A26E/E35D/M47L/V68M/A71G/D90G CD80-IgV-Fc treatment can promote CD8+ T cell expansion in vivo, an important contributor to anti-tumor immunity. Furthermore, H18Y/A26E/E35D/M47L/V68M/A71G/D90G CD80-IgV-Fc was detected on the tumor (ex vivo via hIgG+ staining on CD45− cells) though at reduced levels as compared to those of the anti-PD-L1 antibody (FIG. 16C). Despite reduced presence of E35D/M47L CD80-Fc on the tumor, compared to anti-PD-L1 detected, the anti-tumor activity was superior for the CD80-Fc as compared to the anti-PD-L1 antibody (see section B1 above section). These results are consistent with an observation that the activity of CD80-IgV-Fc may not be only to PD-L1/PD-1 antagonism, but that the differentiating factor may relate to CD28 agonism (PD-L1-dependent CD28 costimulation) and/or CTLA-4 antagonism activities.

### Example 17

### Cytotoxicity to huPD-L1 Transduced MC38 Tumor Cells Compared to Anti-PD-L1 Antibody

[0913] This Example describes the assessment of in vitro cytotoxicity of huPD-L1 transduced MC38 tumor cells. MC38 tumor cells, non-transduced or transduced with huPD-L1, were treated with Mitomycin-C and plated with human pan T cells labelled with CFSE at a 1:5 ratio. Variant CD80 IgV-Fc, containing E35D/M47I/L70M (SEQ ID NO: 125), with either WT IgG1 Fc or an inert Fc were added to MC38 tumor cells at 100 nM or 10 nM and cultured with cells for 72 hours. As a control, an exemplary anti-PD-1 antibody nivolumab or an Fc (inert) only control also were assessed. Cells were then harvested and stained with 7-AAD viability dye. After acquiring samples on a flow cytometer, the percentage of dead cells was calculated using Flowjo analysis by gating on 7-AAD+ cells in the CFSE− gate. As shown in FIG. 17, increased cytotoxicity against huPD-L1 transduced MC38 tumor cells, but not non-transduced MC38 parental cells, was observed by exemplary assessed variant CD80 IgV-Fc molecules. In this assay, cytotoxic activity was not observed in the presence of the control anti-PD-1 antibody, indicating that the variant CD80 IgV Fc molecules exhibit improved activity compared to the anti-PD-1 antibody control.

### Example 18

### CD80 Variant Binding to Primary Human T Cells and Monocytes

[0914] Binding of exemplary variant CD80-IgV Fc molecules to primary CD28+ human CD4 T cells and human PD-L1+ monocytes was assessed. The exemplary variant CD80 IgV-Fc molecules that were assessed contained E35D/M47V/N48K/V68M/K89N (SEQ ID NO: 465), H18Y/A26E/E35D/M47L/V68M/A71G/D90G (SEQ ID NO: 491), E35D/D46V/M47L/V68M/L85Q/E88D (SEQ ID NO: 495), and E35D/D46E/M47V/V68M/D90G/K93E (SEQ ID NO: 499).

[0915] Unactivated human pan T cells were incubated with various concentrations of variant CD80 IgV-Fc and then were stained with anti-CD4, anti-CD8 and anti-human IgG to detect the Fc portion of the CD80 IgV-Fc. As a control, binding of wild-type CD80 IgV-Fc, an Fc only negative control, and a CD28-binding ICOSL vIgD-Fc also was assessed. Binding was assessed by flow cytometry and MFI was determined using Flowjo analysis software. As shown in FIG. 18, the tested variant CD80 IgV-Fc molecules demonstrated differential binding to primary human T cells, which, in some cases, was greater than wildtype CD80-IgV-Fc.

[0916] For binding to human monocyte-expressed PD-L1, human PBMC were plated overnight in the presence of anti-CD3 and anti-CD28. Cells were harvested the next day, incubated with various concentrations of variant CD80 IgV-Fc or an anti-PD-L1 antibody control (durvalumab), and then were stained with anti-CD14 to identify monocytes and anti-human IgG to detect the Fc portion of CD80 IgV molecules. Binding was assessed by flow cytometry and MFI was determined using Flowjo analysis software. As shown in FIG. 19, all tested variant CD80 IgV-Fc molecules demonstrated substantially greater binding to primary human monocytes than wild-type CD80 IgV-Fc.

### Example 19

### Variant CD80 IgV-Fc Antagonism of PD-L1 Mediated PD-1 SHP2 Recruitment

[0917] This Example describes a Jurkat/PD-1/SHP2 Signaling Assay to assess the effect of the variant CD80 IgV-Fc molecules to antagonize the recruitment of the cytoplasmic protein tryrosine phosphatase SHP-2 to PD-1 by blocking PD-L1/PD-1 interaction. In an exemplary assay, a Jurkat cell line containing a recombinant β-galactosidase (β-gal) fragment Enzyme Donor (ED) tagged PD-1 receptor and an Enzyme Acceptor (EA) tagged SHP-2 domain were used (e.g. DiscoverX, USA; cat. 93-1106C19). In the assay, SHP-2 recruitment to PD-1 results in the EA and ED being in close proximity to allow complementation of the two enzyme fragments forming a functional beta-Gal enzyme that hydrolyzes a substrate to generate a chemiluminescent signal.

[0918] K562/OKT3/PD-L1 aAPC were pre-incubated with various concentrations of exemplary variant CD80 IgV-Fc (inert) for 30 minutes. The exemplary variant CD80 IgV-Fc molecules that were assessed contained H18Y/A26E/E35D/M47L/V68M/A71G/D90G (SEQ ID NO: 491), E35D/M47V/N48K/V68M/K89N (SEQ ID NO: 465), E35D/D46V/M47L/V68M/L85Q/E88D (SEQ ID NO: 495), and E35D/D46E/M47V/V68M/D90G/K93E (SEQ ID NO: 499). As a control, wild-type CD80 IgV-Fc (inert), an anti-PD-L1 antibody, and an Fc (inert) only control were also assessed. Jurkat/PD-1/SHP2 cells (DiscoverX Pathhunter Enzyme Complementation Fragment Recruitment line) were added and cells were incubated for 2 hours. The substrate for beta-Gal (DiscoverX Bioassay Detection reagent) was added to the wells, incubated for 1 hour at room temperature in the dark, and the luciferase was measured on a microplate reader (BioTek Cytation).

[0919] As shown in FIG. 20, the exemplary variant CD80 IgV-Fc molecules decreased luciferase activity, consistent with an observation that the variant CD80 IgV-Fc molecules exhibited potent activity to antagonize PD-L1 mediated PD-1 SHP2 recruitment. Potent antagonist activity also was observed by the anti-PD-L1 positive control, but the wild-type CD80 IgV-Fc molecule did not exhibit PD-1/PD-L1 antagonist activity as evidenced by no decrease in luciferase signal detected in the presence of a wild-type CD80 IgV-Fc molecule.

### Example 20

### CD80 Variant Antagonism of B7/CTLA-4 Binding

[0920] To assess the ability of CD80 vIgD-Fc to antagonize the interaction of CTLA-4 and B7 binding, CHO cells, stably expressing surface human CTLA-4 were plated with a titration of E35D/M47V/N48K/V68M/K89N (SEQ ID NO: 465), H18Y/V22A/E35D/M47V/T62S/A71G (SEQ ID NO: 490), H18Y/A26E/E35D/M47L/V68M/A71G/D90G (SEQ ID NO: 491) E35D/D46V/M47L/V68M/L85Q/E88D (SEQ ID NO: 495), or wild-type CD80 vIgD-Fc, or an anti-CTLA-4 antibody (ipilimumab) as a positive control. After washing, cells were incubated with 25 nM fluorochrome-conjugated wild-type CD80-Fc. Bound fluorescent competitor protein was detected and measured by flow cytometry. As shown in FIG. 21, all CD80 vIgD-Fc variants, but not wild-type CD80-Fc, antagonized the binding of CD80 to CTLA-4.

### Example 21

### Assessment of Combination of CD80 Variant Molecule and Anti-PD-1 Antibody in the huPD-L1/B16-F10 Melanoma Model

[0921] This Example describes the assessment of anti-tumor activity of exemplary tested variant CD80 IgV-Fc (inert) (variant CD80 IgV containing amino acid substitutions H18Y/A26E/E35D/M47L/V68M/A71G/D90G; SEQ ID NO: 491). This variant is an exemplary variant identified to have increased binding affinity for PD-L1 compared to wild-type CD80 and activity to block PD-L1 and CTLA-4 and to provide PD-L1-dependent T cell activation via CD28 costimulatory receptor. To test the anti-tumor activity of the exemplary variant, it was evaluated alone or in combination with an anti-mouse PD-1 monoclonal antibody (clone RMP1-14, rat IgG2a) in mice bearing human PD-L1 (huPD-L1)-expressing B16-F10 tumors, which is a syngeneic mouse melanoma model. This model is an aggressive and, in many cases, a treatment-resistant model.

[0922] The B16-F10 cell line was transduced with huPD-L1 to ensure target expression on the tumor by the variant CD80 IgV-Fc. Subconfluent cells (˜80% confluent) were harvested on the day of implantation (study day 0). The cells were washed twice and brought to a final concentration of 5×10⁶ cells/mL in DPBS. Female C57BL/6NJ mice (Jackson Labs, USA) were implanted subcutaneously with approximately 0.5×10⁶ huPD-L1/B16-F10 cells. For injections, 0.1 mL of cells (0.5×10⁶ cells) were injected subcutaneously (SC) per mouse in the right mid-flank region. The B16-F10 cells at time of implant were evaluated to confirm expression of huPD-L1 by flow cytometry. Mice were staged on Day 6 and randomized to groups with similar mean tumor volumes (43 mm³).

[0923] On day 6, mice were randomized into four groups of 12 mice each, with each group having a similar mean tumor volume (42.8 mm³). The tested molecules were delivered through intraperitoneal (IP) injection, with a total of 3 doses delivered via IP injection, on days 6, 8 and 11 as outlined in Table E28.

TABLE E28
Treatment Descriptions

| | | | | Dose | Dose | Route |
|---|---|---|---|---|---|---|
| | | | | Volume | Schedule | of |
| Group | # of | | Dose | (mL/ | (D = | Deliv- |
| # | Mice | Test Article(s) | Level | kg) | day) | ery |
| 1 | 12 | Fc control | 75 μg | 5 | D6, D8, D11 | IP |
| 2 | 12 | Variant CD80 | 100 μg | 5 | D6, D8, D11 | IP |
| | | IgV-Fc | | | | |
| | | (H18Y/A26E/ | | | | |
| | | E35D/M47L/ | | | | |
| | | V68M/A71G/ | | | | |
| | | D90G; | | | | |
| | | SEQ ID | | | | |
| | | NO: 491) | | | | |
| 3 | 12 | Anti-mouse | 100 μg | 5 | D6, D8, D11 | IP |
| | | PD-1 mAb | | | | |
| 4 | 12 | Variant CD80 | 100 μg | 5 | D6, D8, D11 | IP |
| | | IgV-Fc | | | | |
| | | (H18Y/A26E/ | | | | |
| | | E35D/ | | | | |
| | | M47L/V68M/ | | | | |
| | | A71G/D90G; | | | | |
| | | SEQ ID | | | | |
| | | NO: 491) | | | | |
| | | Anti-mouse | 100 μg | 5 | D6, D8, D11 | IP |
| | | PD-1 mAb | | | | |

[0924] Tumors were measured with electronic calipers two-dimensionally twice weekly, beginning on day 6 post-tumor cell implant. Tumor volume was calculated as length×(width×2)×0.5, with the length being the longer of the two measurements. Tumor growth inhibition (TGI) values were obtained as measures of anti-tumor activity calculated using the following formula: [(mean or median Fc control tumor size −mean or median treated tumor size) divided by mean or median Fc control tumor size]×100. Calculations for the mean and median were determined on the last day in which at least 70% of mice were alive on study (day 18 post-tumor cell implant).

[0925] As shown in FIG. 22A, the combination of variant CD80 IgV-Fc (H18Y/A26E/E35D/M47L/V68M/A71G/D90G) and mPD-1 mAb significantly reduced tumor growth (median tumor volumes) over time compared to groups treated with Fc control, variant CD80 IgV-Fc (H18Y/A26E/E35D/M47L/V68M/A71G/D90G) alone or anti-mouse PD-1 mAb alone (p<0.05; 2-way repeated measures ANOVA).

[0926] A percent mean and median tumor growth inhibition (TGI) among individual mice treated were also determined based on tumor volumes from the last day in which at least 70% of mice from each group were alive on study (day 18), using the following formula: [(mean or median Fc control tumor size −mean or median test article treated tumor size) divided by Fc control mean or median tumor size]×100). The anti-tumor activity of the combination as measured by TGI shown in Table E29 and FIG. 22B is consistent with the finding that the combination of variant CD80 IgV-Fc and mPD-1 mAb significantly reduced tumor growth compared to control groups (Kruskal-Wallis test: ** p<0.01 versus the variant CD80-IgV-Fc and anti-mPD-1 mAb groups; **** p<0.0001 versus the Fc control group). The results showed that the exemplary variant CD80 IgV-Fc (H18Y/A26E/E35D/M47L/V68M/A71G/D90G) was particularly effective (92% tumor growth inhibition) in improving the antitumor activity of anti-PD-1 mAb in mice bearing huPD-L1+B16-F10 tumors, a tumor that is known to be poorly immunogenic and treatment-recalcitrant.

TABLE E29
Summary of Anti-Tumor Growth Activity Measured by TGI

| | | | Dose | | Mean | Median |
|---|---|---|---|---|---|---|
| Group | | Dose | Schedule | | TGI | TGI |
| # | Test Article | Level | (days) | Route | (D18) | (D18) |
| 1 | Fc control | 75 μg | D6, D8, D11 | IP | n/a | n/a |
| 2 | Variant | 100 μg | D6, D8, D11 | IP | 33.9 | 39.2 |
| | CD80 IgV-Fc | | | | | |
| | (H18Y/A26E/ | | | | | |
| | E35D/M47L/ | | | | | |
| | V68M/A71G/ | | | | | |
| | D90G; | | | | | |
| | SEQ ID NO: 491) | | | | | |
| 3 | Anti-mouse | 100 μg | D6, D8, D11 | IP | 39.8 | 47.8 |
| | PD-1 mAb | | | | | |
| 4 | Variant | 100 μg | D6, D8, D11 | IP | 86.1 | 92.4 |
| | CD80 IgV-Fc | | | | | |
| | (H18Y/A26E/ | | | | | |
| | E35D/M47L/ | | | | | |
| | V68M/A71G/ | | | | | |
| | D90G; | | | | | |
| | SEQ ID NO: 491) | | | | | |
| | Anti-mouse | 100 μg | D6, D8, D11 | IP | | |
| | PD-1 mAb | | | | | |

[0927] These results demonstrate substantial improvements in anti-tumor activity of a combination therapy including anti-PD-1 and an exemplary provided variant CD80-Fc polypeptides, such as variant CD80 IgV-Fc (inert), including those that exhibits increased binding affinity to PD-L1.

### Example 22

### Assessment of T Cell Response with Combination of CD80 Variant Molecule and Anti-PD-1 Antibody

[0928] A cytomegalovirus (CMV) antigen-specific functional assay was used to assess the effect of combination of an anti-PD-1 antibody (e.g. nivolumab) and an exemplary tested variant CD80 IgV-Fc (inert) (H18Y/A26E/E35D/M47L/V68M/A71G/D90G; SEQ ID NO: 491) on T cell responses.

[0929] Peripheral blood mononuclear cells (PBMC) obtained from CMV seropositive donor were thawed and CMV lysate added at 1 μg/mL to 250,000/well PBMC. The tested exemplary variant CD80 IgV-Fc or wild-type CD80 ECD-Fc was added at various concentrations in the presence or absence of 50 nM concentration of anti-PD-1 antibody (nivolumab). In addition, the anti-PD-1 antibody alone was also tested. An Fc only molecule was also tested as control. Supernatant was collected 48 hours after incubation to assay IL-2 by ELISA.

[0930] As shown in FIG. 23, the tested variant CD80 IgV-Fc molecule showed augmentation of IL-2 production compared to the Fc only control. A dose-dependent increase in IL-2 production also was observed in the presence of increasing concentrations of variant CD80 IgV-Fc. Furthermore, the combination of the tested variant CD80 IgV-Fc molecule and anti-PD-1 antibody showed greater increase in IL-2 production compared to levels of IL-2 production in the presence of either molecule alone.

### Example 23

### Assessment of Dosing and Delivery of CD80 Variant Molecules

[0931] This Example describes the assessment of anti-tumor activity of exemplary tested variant CD80 IgV-Fc (inert) (H18Y/A26E/E35D/M47L/V68M/A71G/D90G; SEQ ID NO: 491) in a syngeneic mouse tumor model of huPD-L1-expressing MC38 tumors delivered by either intraperitoneal (IP) dose or by intratumoral (IT) injections.

[0932] A. Tumor Model

[0933] The MC38 cell line was transduced with human PD-L1 (huPD-L1) Subconfluent cells (˜80% confluent) were harvested on the day of implantation (study day 0), washed twice and brought to a final concentration of 15×10⁶ cells/mL in DPBS. Female C57BL/6NJ mice (Jackson Labs, USA) were implanted subcutaneously with approximately 1.5×10⁶ cells (0.1 mL) in the right mid-flank region.

[0934] On day 7, mice were randomized into six groups, with each group having a similar mean tumor volume (46.6 mm³).

[0935] B. Tumor Growth Assessment

[0936] The exemplary tested variant CD80 IgV-Fc (H18Y/A26E/E35D/M47L/V68M/A71G/D90G; SEQ ID NO: 491) was delivered to groups of tumor-bearing mice once via IP injection on day 8 post-cell implantation at 100, 500 and 1500 μg. The 500 μg dose was also administered to a group of mice as a split dose (three IP injections of 167 μg each, given on days 8, 11 and 14 post-cell implant). An additional group of mice received the variant CD80 IgV-Fc via IT delivery on days 8, 11 and 14 at 100 μg each day. Groups treated with the test molecule were compared to a group of mice that human Fc control by one IP injection on day 8. Treatment groups are summarized in Table E30.

TABLE E30
Summary of Treatment Groups

| | | | | | | | Mice (N) |
|---|---|---|---|---|---|---|---|
| | | | | Dose | | | for Ex |
| | | | | Vol- | Dose | Route | Vivo |
| | # of | | | ume | Schedule | of | Tumor |
| Group | Mice | | Dose | (mL/ | (D = | Deli- | Analysis |
| # | (total) | Test Article | Level | kg) | day) | very | (D11) |
| 1 | 14 | Fc control | 75 μg | 5 | D8 × 1 | IP | 5 |
| 2 | 14 | Variant | 100 μg | 5 | D8 × 1 | IP | 5 |
| 3 | 14 | CD80 IgV- | 500 μg | 5 | D8 × 1 | IP | 5 |
| 4 | 14 | Fc | 1500 μg | 5 | D8 × 1 | IP | 5 |
| 5 | 9 | (H18Y/A26 | 167 μg | 5 | D8, 11, 14 | IP | 0 |
| 6 | 14 | E/E35D/ | 100 μg | 1 | D8, 11, 14 | IT | 5 |
| | | M47L/ | | | | | |
| | | V68M/ | | | | | |
| | | A71G/ | | | | | |
| | | D90G) | | | | | |

[0937] Tumor volume was measured as described in Example 21 to assess anti-tumor activity. Median tumor growth curves among individual treated mice over time were plotted. As shown in FIG. 24A, mice treated with the exemplary tested variant CD80 IgV-Fc by a single IP injection were characterized by a dose-dependent increase in anti-tumor activity compared to Fc control treatment. Each of the groups that received 100 (as one or three IP injections), 500 μg (as one IP injections) or 1500 μg of variant CD80 IgV-Fc by IP injection demonstrated substantial reduction in tumor volume compared to control mice. Dosing by IT injection also resulted in substantial anti-tumor growth activity as compared to the Fc control-treated group.

[0938] C. Tumor Analysis

[0939] On day 11 post-tumor cell implant and prior to dosing of test articles, five mice from each of Group 1-4 and Group 6 were sacrificed, and the tumors were harvested, weighed and processed for ex vivo tumor analysis. The MC38 cells at time of implant and tumors harvested from a subset of mice on day 11 by enzymatic digestion were evaluated for expression of huPD-L1 or human IgG (to detect Fc of cell-bound test molecules) by flow cytometry. The percent positive and median fluorescent intensity (MFI) of huPD-L1 and huIgG were quantified on the CD45-negative subset of tumor cells.

[0940] The percent of cells positive for PD-L1 among CD45-negative cells from day 11 harvested cells was similar among all treatment groups.

[0941] For the groups of mice treated IP with variant CD80 IgV-Fc, the day 11 tumor cells showed a significant and dose-dependent increase in the percent of cells detected with bound test article using anti-huIgG among CD45-negative cell subset (FIG. 24B) or among PD-L1+CD45− cell subset (FIG. 24C). This observation is consistent with dose-dependent tumor localization of the tested molecule, and demonstrates an increased tumor exposure with higher doses of the variant CD80 IgV-Fc. The mice that received 100 μg variant CD80 IgV-Fc by IT delivery had a comparable percentage of detected therapeutic huIgG staining at this time point (reflecting only the first dose of the variant CD80 IgV-Fc delivered IT) that was similar to the same dose level administered by IP injection.

[0942] Tumors at day 11 were also evaluated for CD8+ T cells and for antigen-specific CD8+ T cells within the CD3+ cell population. p15E is an MHC class I restricted T cell antigen expressed in the MC38 tumor cell lines derived from C57BL/6 mice. A mouse MHC class I p15E tetramer labeled with PE (MBL International Corp.) was used to detect the p15E-MHC class I restricted T cell receptor.

[0943] The percentage of p15e tetramer+CD8+ T cells among total cells in the tumors was determined. Cells from tumors from mice treated with either 500 or 1500 μg variant CD80 IgV-Fc (IP) or 100 μg variant CD80 IgV-Fc (IT) had a significantly greater percent of p15E-specific CD8+ T cells as compared to Fc control-treated mice (FIG. 25). This result shows that higher doses of variant CD80 IgV-Fc delivered IP or doses administered IT result in increased percentages of antigen-specific CD8+ T cells in the tumors.

### Example 24

### Generation of Multivalent Variant CD80 IgSF Domain Fusion Proteins and Binding Assessment

[0944] This Example describes generation of variant CD80 IgSF domain fusion proteins containing at least two affinity modified IgV domains from identified variant CD80 polypeptides. Specifically, two units of exemplary variant CD80 IgV with H18Y/A26E/E35D/M47L/V68M/A71G/D90G (SEQ ID NO: 491) were linked together and fused to an Fc in various configurations. Tetravalent and hexavalent molecules were generated.

[0945] A. Generation of Multivalent Proteins

[0946] Multivalent variant CD80 IgSF domain fusion proteins were generated in various configurations as follows. Multivalent variant CD80 IgSF domain fusion proteins were expressed ad purified substantially as described in Example 5. In the generated multivalent proteins, the variant CD80 IgV variants were variously linked to the N- or C-terminus of a human IgG1 Fc region via a GSGGGGS (SEQ ID NO:1522) or 3× GGGGS (SEQ ID NO: 1504) peptide linker. In this study, constructs were generated using either an effectorless human IgG1 Fc region (inert Fc) or a human IgG1 Fc region capable of mediating effector activity (effector Fc).

[0947] The inert Fc region used in generated constructs had the sequence set forth in SEQ ID NO: 1518 and contained the mutation C220S, L234A, L235E, G237A, by EU numbering (the mutations corresponded to C5S, L19A, L20E, G22A, with reference to wild-type human IgG1 Fc set forth in SEQ ID NO: 1502). In some cases, the Fc contained removal of the C-terminal lysine, K447del by EU numbering (corresponding to deletion of position 232, with reference to wild-type or unmodified Fc set forth in SEQ ID NO: 1502).

[0948] The effector Fc had the sequence set forth in SEQ ID NO: 1527 and contained the mutation C220S, E356D and M358L, by EU numbering (the mutations corresponded to C5S, E141D, and M143L, which further contained removal of the C-terminal lysine, K447del by EU numbering (corresponding to deletion of position 232) with reference to wild-type human IgG1 Fc (set forth in SEQ ID NO: 1502). Other Fc regions also are suitable for generation of multivalent molecules.

SEQ ID NO: 1518
EPKSSDKTHTCPPCPAPEAEGAPSVFLFPPKPKD
TLMISRTPEVTCVVVDVSHEDPEVKFNWYVDGVE
VHNAKTKPREEQYNSTYRVVSVLTVLHQDWLNGK
EYKCKVSNKALPAPIEKTISKAKGQPREPQVYTL
PPSRDELTKNQVSLTCLVKGFYPSDIAVEWESNG
QPENNYKTTPPVLDSDGSFFLYSKLTVDKSRWQQ
GNVFSCSVMHEALHNHYTQKSLSLSPG
SEQ ID NO: 1527
EPKSSDKTHTCPPCPAPELLGGPSVFLFPPKPKD
TLMISRTPEVTCVVVDVSHEDPEVKFNWYVDGVE
VHNAKTKPREEQYNSTYRVVSVLTVLHQDWLNGK
EYKCKVSNKALPAPIEKTISKAKGQPREPQVYTL
PPSRDELTKNQVSLTCLVKGFYPSDIAVEWESNG
QPENNYKTTPPVLDSDGSFFLYSKLTVDKSRWQQ
GNVFSCSVMHEALHNHYTQKSLSLSPG

[0949] Nucleic acid molecules encoding the multivalent constructs also contained residues encoding the exemplary signal peptide MGSTAILALLLAVLQGVSA (set forth in SEQ ID NO: 276). Expression constructs encoding Fc fusion proteins of interest were transiently expressed in Expi293. For each multivalent protein, the encoding nucleic acid molecule was designed to produce proteins in various configurations with sequences in the order shown:

Multivalent variant CD80 IgSF domain
fusion protein 1 (SEQ ID NO: 1529):
CD80 variant IgV (SEQ ID NO: 491)-
GSGGGGS (SEQ ID NO: 1522)-
Fc (SEQ ID NO: 1518)-3x GGGGS
(SEQ ID NO: 1504)-CD80 variant
IgV (SEQ ID NO: 491)
Multivalent variant CD80 IgSF domain
fusion protein 2 (SEQ ID NO: 1531):
CD80 variant IgV (SEQ ID NO: 491)-
GSGGGGS (SEQ ID NO: 1522)-
Fc (SEQ ID NO: 1527)-
3x GGGGS (SEQ ID NO: 1504)-
CD80 variant IgV (SEQ ID NO: 491)
Multivalent variant CD80 IgSF domain
fusion protein 3 (SEQ ID NO: 1533):
CD80 variant IgV (SEQ ID NO: 491)-
3x GGGGS (SEQ ID NO: 1504)-
CD80 variant IgV (SEQ ID NO: 491)-
GSGGGGS (SEQ ID NO: 1522)-
Fc (SEQ ID NO: 1518)
Multivalent variant CD80 IgSF domain
fusion protein 4 (SEQ ID NO: 1535):
CD80 variant IgV (SEQ ID NO: 491)-
3x GGGGS (SEQ ID NO: 1504)-
CD80 variant IgV (SEQ ID NO: 491)-
GSGGGGS (SEQ ID NO: 1522)-
Fc (SEQ ID NO: 1527)

[0950] B. Binding Assessment

[0951] Binding assays were carried out to assess the specificity and affinity of multivalent proteins to cell-expressed CTLA-4, CD28, and PD-L1 counter structures. The multivalent variant CD80 IgSF domain fusion proteins were tested for binding, substantially as described in Example 7 except that 11.1 nM of each variant CD80 Fc-fusion molecules were added to cells engineered to express the indicated cognate counter structure ligand (i.e., CTLA-4, PD-L1, or CD28). The ratio of the MFI of the multivalent variant CD80 IgV-Fc, compared to the binding of the unmodified CD80-ECD-Fc fusion molecule (R&D Systems, USA) not containing the amino acid substitution(s), to the same cell-expressed counter structure ligand is shown in Table E31. As shown, the multivalent variant CD80 IgSF domain fusion proteins exhibited increased binding for one or more of the counter structures.

TABLE E31
Binding to cells stably expressing CD28, CTLA4 or PD-L1

| | Protein | Flow Binding to Jurkats (CD28) and | | | | | | | | |
|---|---|---|---|---|---|---|---|---|---|---|
| | SEQ | CHO cells stably expressing CTLA4 or PD-L1 | | | | | | | | |
| | ID NO | CTLA4 | | | | CD28 | | PD-L1 | | |
| | (DNA | | Fold | | | Fold | | | Fold | |
| | SEQ | | change | | | change | | | change | |
| | ID | MFI at | to WT | EC50 | MFI at | to WT | EC50 | MFI at | to WT | EC50 |
| Description | NO) | 11.1 nM | CD80 | (nM) | 11.1 nM | CD80 | (nM) | 11.1 nM | CD80 | (nM) |
| Multivalent | 1529 | 10486 | 0.6 | 1.1 | 2736 | 19.7 | 0.2 | 14349 | 166.8 | 2.1 |
| protein 1: | (1528) | | | | | | | | | |
| Variant CD80 | | | | | | | | | | |
| IgV-GSG4S- | | | | | | | | | | |
| Fc-3xG4S- | | | | | | | | | | |
| variant CD80 | | | | | | | | | | |
| IgV | | | | | | | | | | |
| Multivalent | 1531 | 10564 | 0.6 | 1.1 | 2636 | 19.0 | 0.3 | 12757 | 148.3 | 3.0 |
| protein 2: | (1530) | | | | | | | | | |
| Variant CD80 | | | | | | | | | | |
| IgV-GSG4S- | | | | | | | | | | |
| Fc-3xG4S- | | | | | | | | | | |
| variant CD80 | | | | | | | | | | |
| IgV | | | | | | | | | | |
| Multivalent | 1533 | 10993 | 0.7 | 5.0 | 2736 | 19.7 | 0.4 | 14822 | 172.3 | 3.0 |
| protein 3: | (1532) | | | | | | | | | |
| Variant CD80 | | | | | | | | | | |
| IgV-3xG4S- | | | | | | | | | | |
| variant CD80 | | | | | | | | | | |
| IgV-GSG4S- | | | | | | | | | | |
| Fc | | | | | | | | | | |
| Multivalent | 1535 | 12479 | 0.8 | 1.9 | 2702 | 19.4 | 0.5 | 15819 | 183.9 | 0.9 |
| protein 4: | (1534) | | | | | | | | | |
| Variant CD80 | | | | | | | | | | |
| IgV-3xG4S- | | | | | | | | | | |
| variant CD80 | | | | | | | | | | |
| IgV-GSG4S- | | | | | | | | | | |
| Fc | | | | | | | | | | |
| CD80 IgV-Fc | 491 | 16243 | 1.0 | 1.3 | 2630 | 18.9 | 6.5 | 19622 | 228.2 | 3.6 |
| WT CD80 | | 16610 | 1.0 | 2.2 | 139 | 1.0 | 164.4 | 86 | 1.0 | 31.2 |
| ECD-Fc | | | | | | | | | | |
| Fc control | | 106 | 0.0 | 0.0 | 26 | 0.2 | 0.0 | 158 | 1.8 | 0.0 |

[0952] C. Blocking PD-L1/PD-1 Interaction

[0953] The multivalent variant CD80 IgSF domain fusion proteins were assessed to test for blocking of the PD-L1/PD-1 and CTLA-4/CD80 interaction performed substantially as described in Example 15. CHO/OKT3/PD-L1 and CHO/CTLA-4 cells were counted and plated at 100,000 cells/well and then incubated with fluorescently conjugated PD-1-Fc and CD80-Fc. Exemplary multivalent variant CD80 IgSF domain fusion proteins were incubated with the cells for 30 minutes. As a control, an Fc only molecule, anti-PD-L1 antibody, anti-CTA-4 antibody and a bivalent variant CD80 IgV-Fc were also assessed. Cells were washed and incubated with 100 nM fluorescently conjugated PD-1-Fc and CD80-Fc competitor for 30 minutes. Cells were then washed and samples were acquired on a flow cytometer and MFIs of the fluorescently labeled molecules were determined.

[0954] As shown in FIGS. 26A and 26B, the exemplary multivalent variant CD80 IgV-Fc molecules tested were shown to antagonize or block binding of PD-1 to PD-L1 and CD80 to CTLA-4. Improved antagonist activity to block PD1/PD-L1 and CD80/CTLA-4 was observed compared to the bivalent variant CD80 IgV-Fc.

[0955] D. Cytomegalovirus (CMV) Antigen Specific T Cell Response

[0956] The multivalent variant CD80 IgSF domain fusion proteins were assessed to test for IL-2 production in the CMV assay substantially as described in Example 22. Exemplary multivalent variant CD80 IgSF domain fusion proteins generated as described above were tested at various concentrations from 100000 pM to 46 pM

[0957] As shown in FIG. 27, the tested multivalent molecules showed a greater increase in IL-2 production compared to levels of IL-2 production in the presence of molecules containing a wildtype CD80 ECD-Fc molecule or the variant CD80 IgV-Fc molecule in a bivalent format. The effectorless multivalent molecules containing the Fc set forth in SEQ ID NO: 1518 (inert) showed increased IL-2 productions compared to corresponding molecules on the effector Fc backbone (SEQ ID NO: 1527). Particularly at higher concentrations, lower levels of IL-2 production were observed with effector Fc constructs compared to inert Fc constructs. Without wishing to be bound by theory, the differences in activity with the different Fc constructs may be due to higher exposure or affinity for PD-L1 vs. FcR in this assay, thereby resulting in a greater PD-L1-dependent CD28 agonism than FcR-dependent CD28 agonism in this assay.

### Example 25

### Generation of Additional Variant CD80 IgV Domains and Assessment of Binding Activity

[0958] Constructs were generated based on a wildtype human CD80 amino acid sequence of the extracellular domain (ECD) set forth in SEQ ID NO: 2 (corresponding to residues 35-242 as set forth in UniProt Accession No. P33681) as follows:

VIHVTKEVKEVATLSCGHNVSVEELAQTRIYWQKE
KKMVLTMMSGDMNIWPEYKNRTIFDITNNLSIVIL
ALRPSDEGTYECVVLKYEKDAFKREHLAEVTLSV
KADFPTPSISDFEIPTSNIRRIICSTSGGFPEPH
LSWLENGEELNAINTTVSQDPETELYAVSSKLDF
NMTTNHSFMCLIKYGHLRVNQTFNWNTTKQEHFP
DN

[0959] For these variants, yeast displayed targeted or random CD80 libraries were selected against each of CD28, CTLA-4 and PD-L1 separately. The CD80 variants were generated and expressed as Fc fusion proteins essentially as described in Examples 2-5.

[0960] A. Binding to Cell-Expressed Counter Structures

[0961] This Example describes Fc-fusion binding studies to show specificity and affinity of CD80 domain variant immunomodulatory proteins for cognate binding partners.

[0962] To produce cells expressing cognate binding partners, full-length mammalian surface expression constructs for each of human CD28, CTLA-4 and PD-L1, were designed in pcDNA3.1 expression vector (Life Technologies) and sourced from Genscript, USA. Binding studies were carried out using the Expi293F transient transfection system (Life Technologies, USA). The number of cells needed for the experiment was determined, and the appropriate 30 ml scale of transfection was performed using the manufacturer's suggested protocol. For each CD28, CTLA-4, PD-L1, or mock 30 ml transfection, 75 million Expi293F cells were incubated with 30 μg expression construct DNA and 1.5 ml diluted ExpiFectamine 293 reagent for 48 hours, at which point cells were harvested for staining.

[0963] For staining by flow cytometry, 200,000 cells of appropriate transient transfection or negative control were plated in 96-well round bottom plates. Cells were spun down and resuspended in staining buffer (PBS (phosphate buffered saline), 1% BSA (bovine serum albumin), and 0.1% sodium azide) for 20 minutes to block non-specific binding. Afterwards, cells were centrifuged again and resuspended in staining buffer containing 100 nM to 1 nM variant immunomodulatory protein, depending on the experiment of each candidate variant CD80 Fc protein in 50 μl. Primary staining was performed on ice for 45 minutes, before washing cells in staining buffer twice. PE-conjugated anti-human Fc (Jackson ImmunoResearch, USA) was diluted 1:150 in 50 μl staining buffer and added to cells and incubated another 30 minutes on ice. Secondary antibody was washed out twice, cells were fixed in 4% formaldehyde/PBS, and samples were analyzed on FACScan flow cytometer (Becton Dickinson, USA).

[0964] Mean Fluorescence Intensity (MFI) was calculated for each transfectant and negative parental line with Cell Quest Pro software (Becton Dickinson, USA).

[0965] B. Bioactivity Characterization

[0966] This Example further describes Fc-fusion variant protein bioactivity characterization in human primary T cell in vitro assays.

[0967] 1. Mixed Lymphocyte Reaction (MLR)

[0968] Soluble rCD80.Fc bioactivity was tested in a human Mixed Lymphocyte Reaction (MLR). Human primary dendritic cells (DC) were generated by culturing monocytes isolated from PBMC (BenTech Bio, USA) in vitro for 7 days with 500U/ml rIL-4 (R&D Systems, USA) and 250 U/ml rGM-CSF (R&D Systems, USA) in Ex-Vivo 15 media (Lonza, Switzerland). 10,000 matured DC and 100,000 purified allogeneic CD4+ T cells (BenTech Bio, USA) were co-cultured with variant CD80 Fc fusion proteins and controls in 96 well round bottom plates in 200 μl final volume of Ex-Vivo 15 media. On day 5, IFN-gamma secretion in culture supernatants was analyzed using the Human IFN-gamma Duoset ELISA kit (R&D Systems, USA). Optical density was measured by VMax ELISA Microplate Reader (Molecular Devices, USA) and quantitated against titrated rIFN-gamma standard included in the IFN-gamma Duo-set kit (R&D Systems, USA).

[0969] 2. Anti-CD3 Coimmobilization Assay

[0970] Costimulatory bioactivity of CD80 fusion variants was determined in anti-CD3 coimmobilization assays. 1 nM or 4 nM mouse anti-human CD3 (OKT3, Biolegends, USA) was diluted in PBS with 1 nM to 80 nM rCD80.Fc variant proteins. This mixture was added to tissue culture treated flat bottom 96-well plates (Corning, USA) overnight to facilitate adherence of the stimulatory proteins to the wells of the plate. The next day, unbound protein was washed off the plates and 100,000 purified human pan T cells (BenTech Bio, US) or human T cell clone BC3 (Astarte Biologics, USA) were added to each well in a final volume of 200 μl of Ex-Vivo 15 media (Lonza, Switzerland). Cells were cultured 3 days before harvesting culture supernatants and measuring human IFN-gamma levels with Duoset ELISA kit (R&D Systems, USA) as described above.

[0971] C. Results

[0972] Results for the binding and activity studies for exemplary tested variants are shown in Tables E32, E33, and E34. In particular, Table E32 indicates exemplary IgSF domain amino acid substitutions (replacements) in the ECD of CD80 selected in the screen for affinity-maturation against the respective cognate structure CD28. Table E33 indicates exemplary IgSF domain amino acid substitutions (replacements) in the ECD of CD80 selected in the screen for affinity-maturation against the respective cognate structure PD-L1. For the Tables, the exemplary amino acid substitutions are designated by amino acid position number corresponding to the respective reference unmodified ECD sequence.

[0973] Also shown is the binding activity as measured by the Mean Fluorescence Intensity (MFI) value for binding of each variant Fc-fusion molecule to cells engineered to express the cognate counter structure ligand and the ratio of the MFI compared to the binding of the corresponding unmodified ECD-Fc fusion molecule not containing the amino acid substitution(s) to the same cell-expressed counter structure ligand. The functional activity of the variant Fc-fusion molecules to modulate the activity of T cells also is shown based on the calculated levels of IFN-gamma in culture supernatants (pg/ml) generated either i) with the indicated variant ECD-Fc fusion molecule coimmobilized with anti-CD3 or ii) with the indicated variant ECD-Fc fusion molecule in an MLR assay. Tables E32-34 also depict the ratio of IFN-gamma produced by each variant ECD-Fc compared to the corresponding unmodified ECD-Fc in both functional assays.

[0974] As shown, the selections resulted in the identification of a number of CD80 IgSF domain variants that were affinity-modified to exhibit increased binding for at least one, and in some cases more than one, cognate counter structure ligand. In addition, the results showed that affinity modification of the variant molecules also exhibited improved activities to both increase and decrease immunological activity depending on the format of the molecule. For example, coimmobilization of the ligand likely provides a multivalent interaction with the cell to cluster or increase the avidity to favor agonist activity and increase T cell activation compared to the unmodified (e.g. wildtype) ECD-Fc molecule not containing the amino acid replacement(s). However, when the molecule is provided as a bivalent Fc molecule in solution, the same IgSF domain variants exhibited an antagonist activity to decrease T cell activation compared to the unmodified (e.g. wildtype) ECD-Fv molecule not containing the amino acid replacement(s).

TABLE E32
Variant CD80 selected against CD28. Molecule sequences, binding data, and
costimulatory bioactivity data.

| | | | | | Coimmobilization | |
|---|---|---|---|---|---|---|
| | | | | | with anti CD3 | MLR |
| | | Binding | | | IFN- | IFN-gamma |
| | | CD28 | CTLA- | PD-L1 | gamma | levels |
| | SEQ | MFI | 4 MFI | MFI | pg/ml | pg/ml |
| | ID NO | (parental | (parental | (parental | (parental | (parental |
| CD80 mutation(s) | (ECD) | ratio) | ratio) | ratio) | ratio) | ratio) |
| L70Q/A91G/N144D | 1383 | 125 | 283 | 6 | 93 | 716 |
| | | (1.31) | (1.36) | (0.08) | (1.12) | (0.83) |
| L70Q/A91G/T130A | 1448 | 96 | 234 | 7 | 99 | 752 |
| | | (1.01) | (1.13) | (0.10) | (1.19) | (0.87) |
| L70Q/A91G/I118A/ | 1384 | 123 | 226 | 7 | 86 | 741 |
| T120S/T130A/K169E | | (1.29) | (1.09) | (0.10) | (1.03) | (0.86) |
| V4M/L70Q/A91G/I118V/ | 1385 | 89 | 263 | 6 | 139 | 991 |
| T120S/T130A/K169E | | (0.94) | (1.26) | (0.09) | (1.67) | (1.14) |
| L70Q/A91G/I118V/T120S/ | 1386 | 106 | 263 | 6 | 104 | 741 |
| T130A/K169E | | (1.12) | (1.26) | (0.09) | (1.25) | (0.86) |
| V20L/L70Q/A91S/I118V/ | 1388 | 105 | 200 | 9 | 195 | 710 |
| T120S/T130A | | (1.11) | (0.96) | (0.13) | (2.34) | (0.82) |
| S44P/L70Q/A91G/T130A | 1453 | 88 | 134 | 5 | 142 | 854 |
| | | (0.92) | (0.64) | (0.07) | (1.71) | (0.99) |
| L70Q/A91G/E117G/I118V/ | 1389 | 120 | 193 | 6 | 98 | 736 |
| T120S/T130A | | (1.27) | (0.93) | (0.08) | (1.05) | (0.85) |
| A91G/T120S/I118V/T130A | 1390 | 84 | 231 | 44 | 276 | 714 |
| | | (0.89) | (1.11) | (0.62) | (3.33) | (0.82) |
| L70R/A91G/I118V/T120S/ | 1391 | 125 | 227 | 6 | 105 | 702 |
| T130A/T199S | | (1.32) | (1.09) | (0.09) | (1.26) | (0.81) |
| L70Q/E81A/A91G/I118V/T120S/ | 1392 | 140 | 185 | 18 | 98 | 772 |
| I127T/T130A | | (1.48) | (0.89) | (0.25) | (1.18) | (0.89) |
| L70Q/Y87N/A91G/T130A | 1458 | 108 | 181 | 6 | 136 | 769 |
| | | (1.13) | (0.87) | (0.08) | (1.63) | (0.89) |
| T28S/L70Q/A91G/ | 1393 | 32 | 65 | 6 | 120 | 834 |
| E95K/I118V/T120S/I126V/ | | (0.34) | (0.31) | (0.08) | (1.44) | (0.96) |
| T130A/K169E | | | | | | |
| N63S/L70Q/A91G/ | 1394 | 124 | 165 | 6 | 116 | 705 |
| S114T/I118V/T120S/T130A | | (1.30) | (0.79) | (0.08) | (1.39) | (0.81) |
| K36E/I67T/L70Q/A91G/ | 1395 | 8 | 21 | 5 | 53 | 852 |
| I118V/T1205/T130A/N152T | | (0.09) | (0.10) | (0.08) | (0.63) | (0.98) |
| E52G/L70Q/A91G/D107N/I118V/ | 1396 | 113 | 245 | 6 | 94 | 874 |
| T1205/T130A/K169E | | (1.19) | (1.18) | (0.08) | (1.13) | (1.01) |
| K37E/F595/L70Q/A91G/T120S/ | 1397 | 20 | 74 | 6 | 109 | 863 |
| T130A | | (0.21) | (0.36) | (0.08) | (1.31) | (1.00) |
| A91G/S103P | 1464 | 39 | 56 | 9 | 124 | 670 |
| | | (0.41) | (0.27) | (0.13) | (1.49) | (0.77) |
| K89E/T130A | 1465 | 90 | 148 | 75 | 204 | 761 |
| | | (0.95) | (0.71) | (1.07) | (2.45) | (0.88) |
| A91G | 1466 | 96 | 200 | 85 | 220 | 877 |
| | | (1.01) | (0.96) | (1.21) | (2.65) | (1.01) |
| D60V/A91G/I118V/T120S/ | 1398 | 111 | 222 | 12 | 120 | 744 |
| T130A/K169E | | (1.17) | (1.07) | (0.18) | (1.44) | (0.86) |
| K54M/L70Q/A91G/Y164H | 1399 | 68 | 131 | 5 | 152 | 685 |
| | | (0.71) | (0.63) | (0.08) | (1.83) | (0.79) |
| M38T/L70Q/E77G/A91G/ | 1400 | 61 | 102 | 5 | 119 | 796 |
| I118V/T120S/T130A/N152T | | (0.64) | (0.49) | (0.07) | (1.43) | (0.92) |
| R29H/E52G/L70R/ | 1470 | 100 | 119 | 5 | 200 | 740 |
| E88G/A91G/T130A | | (1.05) | (0.57) | (0.08) | (2.41) | (0.85) |
| Y31H/T41G/M43L/L70Q/A91G/ | 1401 | 85 | 85 | 6 | 288 | 782 |
| I118V/T120S//I126V/T130A | | (0.89) | (0.41) | (0.08) | (3.47) | (0.90) |
| V68A/T110A | 1472 | 103 | 233 | 48 | 163 | 861 |
| | | (1.08) | (1.12) | (0.68) | (1.96) | (0.99) |
| L65H/D90G/T110A/F116L | 1402 | 33 | 121 | 11 | 129 | 758 |
| | | (0.35) | (0.58) | (0.15) | (1.55) | (0.88) |
| R29H/E52G/D90N/I118V/T120S/ | 1403 | 66 | 141 | 11 | 124 | 800 |
| T130A | | (0.69) | (0.68) | (0.15) | (1.49) | (0.92) |
| A91G/L102S | 1475 | 6 | 6 | 5 | 75 | 698 |
| | | (0.06) | (0.03) | (0.08) | (0.90) | (0.81) |
| I67T/L70Q/A91G/I118V/T120S | 1405 | 98 | 160 | 5 | 1751 | 794 |
| | | (1.03) | (0.77) | (0.08) | (21.1) | (0.92) |
| L70Q/A91G/T110A/ | 1406 | 8 | 14 | 5 | 77 | 656 |
| I118V/T120S/T130A | | (0.09) | (0.07) | (0.07) | (0.93) | (0.76) |
| M38V/T41D/M43I/ | 1407 | 5 | 8 | 8 | 82 | 671 |
| W50G/D76G/V83A/ | | (0.06) | (0.04) | (0.11) | (0.99) | (0.78) |
| K89E/I118V/T120S/I126V/T130A | | | | | | |
| V22A/L70Q/S121P | 1479 | 5 | 7 | 5 | 105 | 976 |
| | | (0.06) | (0.04) | (0.07) | (1.27) | (1.13) |
| A12V/S15F/Y31H/M38L/ | 1408 | 6 | 6 | 5 | 104 | 711 |
| T41G/M43L/D90N/T130A/P137L/ | | (0.06) | (0.03) | (0.08) | (1.25) | (0.82) |
| N149D/N152T | | | | | | |
| I67F/L70R/E88G/A91G/ | 1409 | 5 | 6 | 6 | 62 | 1003 |
| I118V/T120S/T130A | | (0.05) | (0.03) | (0.08) | (0.74) | (1.16) |
| E24G/L25P/L70Q/A91G/I118V/ | 1410 | 26 | 38 | 8 | 101 | 969 |
| T120S/N152T | | (0.27) | (0.18) | (0.11) | (1.21) | (1.12) |
| A91G/F92L/F108L/1118V/T120S | 1411 | 50 | 128 | 16 | 59 | 665 |
| | | (0.53) | (0.61) | (0.11) | (0.71) | (0.77) |
| WT CD80 | 2 | 95 | 208 | 70 | 83 | 866 |
| | | (1.00) | (1.00) | (1.00) | (1.00) | (1.00) |

TABLE E33
Variant CD80 selected against PD-L1. Molecule sequences, binding data, and
costimulatory bioactivity data.

| | | | | | Coimmobilization | |
|---|---|---|---|---|---|---|
| | | | | | with | MLR |
| | | Binding | | | anti-CD3 | IFN-gamma |
| | | CD28 | CTLA-4 | PD-L1 | IFN-gamma | levels |
| | SEQ ID | MFI | MFI | MFI | pg/ml | pg/ml |
| | NO | (parental | (parental | (parental | (parental | (parental |
| CD80 mutation(s) | (ECD) | ratio) | ratio) | ratio) | ratio) | ratio) |
| R29D/Y31L/Q33H/ | 1484 | 1071 | 1089 | 37245 | 387 | 5028 |
| K36G/M38I/T41A/ | | (0.08) | (0.02) | (2.09) | (0.76) | (0.26) |
| M43R/M47T/E81V/ | | | | | | |
| L85R/K89N/A91T/ | | | | | | |
| F92P/K93V/R94L/ | | | | | | |
| I118T/N149S | | | | | | |
| R29D/Y31L/Q33H/ | 1485 | 1065 | 956 | 30713 | 400 | 7943 |
| K36G/M38I/T41A/ | | (0.08) | (0.02) | (1.72) | (0.79) | (0.41) |
| M43R/M47T/E81V/ | | | | | | |
| L85R/K89N/A91T/ | | | | | | |
| F92P/K93V/R94L/ | | | | | | |
| N144S/N149S | | | | | | |
| R29D/Y31L/Q33H/ | 1486 | 926 | 954 | 47072 | 464 | 17387 |
| K36G/M38I/T41A/ | | (0.07) | (0.02) | (2.64) | (0.91) | (0.91) |
| M42T/M43R/M47T/ | | | | | | |
| E81V/L85R/K89N/ | | | | | | |
| A91T/F92P/K93V/ | | | | | | |
| R94L/L148S/N149S | | | | | | |
| E24G/R29D/Y31L/ | 1487 | 1074 | 1022 | 1121 | 406 | 13146 |
| Q33H/K36G/M38I/ | | (0.08) | (0.02) | (0.06) | (0.80) | (0.69) |
| T41A/M43R/M47T/ | | | | | | |
| F59L/E81V/L85R/ | | | | | | |
| K89N/A91T/F92P/ | | | | | | |
| K93V/R94L/H96R/ | | | | | | |
| N149S/C182S | | | | | | |
| R29D/Y31L/Q33H/ | 1488 | 1018 | 974 | 25434 | 405 | 24029 |
| K36G/M38I/T41A/ | | (0.08) | (0.02) | (1.43) | (0.80) | (1.25) |
| M43R/M47T/E81V/ | | | | | | |
| L85R/K89N/A91T/ | | | | | | |
| F92P/K93V/R94L/N149S | | | | | | |
| R29V/M43Q/E81R/ | 1489 | 1029 | 996 | 1575 | 342 | 11695 |
| L85I/K89R/D90L/ | | (0.08) | (0.02) | (0.09) | (0.67) | (0.61) |
| A91E/F92N/K93Q/R94G | | | | | | |
| T41I/A91G | 1490 | 17890 | 50624 | 12562 | 433 | 26052 |
| | | (1.35) | (1.01) | (0.70) | (0.85) | (1.36) |
| E88D/K89R/D90K/A91G/ | 1412 | 41687 | 49429 | 20140 | 773 | 6345 |
| F92Y/K93R/N122S/ | | (3.15) | (0.99) | (1.13) | (1.52) | (0.33) |
| N177S | | | | | | |
| E88D/K89R/D90K/A91G/ | 1494 | 51663 | 72214 | 26405 | 1125 | 9356 |
| F92Y/K93R | | (3.91) | (1.44) | (1.48) | (2.21) | (0.49) |
| K36G/K37Q/M38I/ | 1414 | 1298 | 1271 | 3126 | 507 | 3095 |
| L40M/F59L/E81V/L85R/ | | (0.10) | (0.03) | (0.18) | (1.00) | (0.16) |
| K89N/A91T/F92P/ | | | | | | |
| K93V/R94L/E99G/ | | | | | | |
| T130A/N149S | | | | | | |
| E88D/K89R/D90K/ | 1494 | 31535 | 50868 | 29077 | 944 | 5922 |
| A91G/F92Y/K93R | | (2.38) | (1.02) | (1.63) | (1.85) | (0.31) |
| K36G/K37Q/M38I/L40M | 1495 | 1170 | 1405 | 959 | 427 | 811 |
| | | (0.09) | (0.03) | (0.05) | (0.84) | (0.04) |
| K36G/L40M | 1412 | 29766 | 58889 | 20143 | 699 | 30558 |
| | | (2.25) | (1.18) | (1.13) | (1.37) | (1.59) |
| WTCD80 | 2 | 13224 | 50101 | 17846 | 509 | 19211 |
| | | (1.00) | (1.00) | (1.00) | (1.00) | (1.00) |

TABLE E34
CD80 variants selected against CTLA-4 or PD-L1. Molecule sequences, binding data,
and costimulatory bioactivity data.

| | | PD-Ll | Anti-CD3 IFN- |
|---|---|---|---|
| CD28 | CTLA-4 | tfxn | gamma |

| | SEQ ID | tfxn MFI | tfxn MFI | MFI | Coimmobilization |
|---|---|---|---|---|---|
| | NO | (parental | (parental | (parental | Assay pg/ml |
| CD80 mutation(s) | (ECD) | ratio) | ratio) | ratio) | (parental ratio) |
| R29D, Y31L, Q33H, K36G, M38I, | 1415 | 3536 | 5731 | 173405 | 109 (0.24) |
| T41A, M43R, M47T, E81V, L85R, | | (0.08) | (0.01) | (0.08) | |
| K89N, A91T, F92P, K93V, R94L, | | | | | |
| I118V, T120S, I127T, T130A, | | | | | |
| K169E | | | | | |
| R29D, Y31L, Q33H, K36G, M38I, | 1416 | 4962 | 2027 | 626341 | 162 (0.36) |
| T41A, M43R, M47T, L70Q, E81V, | | (0.11) | (0.01) | (0.11) | |
| L85R, K89N, A91T, F92P, K93V, | | | | | |
| R94L, I118V, T120S, I127T, | | | | | |
| T130A, | | | | | |
| H18L, R29D, Y31L, Q33H, K36G, | 1417 | 3489 | 2521 | 215826 | 206 (0.46) |
| M38I, T41A, M43R, M47T, E81V, | | (0.08) | (0.01) | (0.08) | |
| L85R, K89N, A91T, F92P, K93V, | | | | | |
| R94L, I118V, T120S, I127T, | | | | | |
| T130A, K169E | | | | | |
| R29D, Y31L, Q33H, K36G, M38I, | 1418 | 2736 | 2493 | 157897 | 141 (0.31) |
| T41A, M43R, M47T, E81V, L85R, | | (0.06) | (0.01) | (0.06) | |
| K89N, A91T, F92P, K93V, R94L, | | | | | |
| I118V, T120S, T130A, K169E, | | | | | |
| M174T | | | | | |
| R29D, Y31L, Q33H, K36G, M38I, | 1419 | 2393 | 2663 | 137062 | 230 (0.51) |
| T41A, M43R, M47T, N48D, F59L, | | (0.05) | (0.01) | (0.05) | |
| E81V, L85R, K89N, A91T, F92P, | | | | | |
| K93V, R94L, I118V, T120S, I127T, | | | | | |
| T130A, H188D | | | | | |
| H18R, R29D, Y31L, Q33H, K36G, | 1420 | 3023 | 2303 | 158977 | 305 (0.68) |
| K37E, M38I, T41A, M43R, M47T, | | (0.07) | (0.01) | (0.07) | |
| L70Q, E81V, L85R, K89N, A91T, | | | | | |
| F92P, K93V, R94L, I118V, T120S, | | | | | |
| T130A, K169E, H188D | | | | | |
| R29D, Y31L, Q33H, K36G, M38I, | 1421 | 2135 | 2816 | 374117 | 291 (0.65) |
| T41A, M43R, M47T, L70Q, E81V, | | (0.05) | (0.01) | (0.05) | |
| L85R, K89N, A91T, F92P, K93V, | | | | | |
| R94L, I118V, T120S, I127T, | | | | | |
| T130A, E143G, K169E, M174V, | | | | | |
| H188D | | | | | |
| R29D, Y31L, Q33H, K36G, M38I, | 1415 | 2157 | 2819 | 114963 | 197 (0.44) |
| T41A, M43R, M47T, E81V, L85R, | | (0.05) | (0.01) | (0.05) | |
| K89N, A91T, F92P, K93V, R94L, | | | | | |
| I118V, T120S, I127T, T130A, | | | | | |
| K169E | | | | | |
| R29D, Y31L, Q33H, K36G, M38I, | 1416 | 2126 | 2377 | 530029 | 135 (0.30) |
| T41A, M43R, M47T, L70Q, E81V, | | (0.05) | (0.01) | (0.05) | |
| L85R, K89N, A91T, F92P, K93V, | | | | | |
| R94L, I118V, T120S, I127T, T130A | | | | | |
| R29D, I30V, Y31L, Q33H, K36G, | 1422 | 1914 | 2024 | 179536 | 127 (0.28) |
| M38I, T41A, M43R, M47T, E81V, | | (0.04) | (0.01) | (0.04) | |
| L85R, K89N, A91T, F92P, K93V, | | | | | |
| R94L, I118V, T120S, I127T, | | | | | |
| T130A, H188D | | | | | |
| R29D, Y31L, Q33H, K36G, M38I, | 1424 | 2377 | 2177 | 438352 | 203 (0.45) |
| T41A, M43R, M47T, L70Q, E81V, | | (0.05) | (0.01) | (0.05) | |
| L85R, K89N, A91T, F92P, K93V, | | | | | |
| R94L, I118V, T120S, I127T, | | | | | |
| T130A, K169E | | | | | |
| R29D, Y31L, Q33H, K36G, M38I, | 1425 | 2106 | 2122 | 14201 | 226 (0.50) |
| T41A, M43R, M47T, L70Q, E81V, | | (0.05) | (0.01) | (0.05) | |
| K89N, A91T, F92P, K93V, R94L, | | | | | |
| I118V, T120S, I127T, T130A | | | | | |
| R29D, Y31L, Q33H, K36G, M38I, | 1426 | 1887 | 2201 | 110092 | 231 (0.51) |
| T41A, M43R, M47T, L85R, K89N, | | (0.04) | (0.01) | (0.04) | |
| A91T, F92P, K93V, R94L, I118V, | | | | | |
| T120S, I127T, T130A, K169E, | | | | | |
| H188D | | | | | |
| R29D, I30V, Y31L, Q33H, K36G, | 1422 | 2060 | 2385 | 94786 | 237 (0.53) |
| M38I, T41A, M43R, M47T, E81V, | | (0.05) | (0.01) | (0.05) | |
| L85R, K89N, A91T, F92P, K93V, | | | | | |
| R94L, I118V, T120S, I127T, | | | | | |
| T130A, H188D | | | | | |
| R29D, Y31L, Q33H, K36G, M38I, | 1427 | 2009 | 2623 | 110589 | 165 (0.37) |
| T41A, M43R, M47T, E81V, L85R, | | (0.04) | (0.01) | (0.04) | |
| K89N, A91T, F92P, K93V, R94L, | | | | | |
| F108L, I118V, T120S, T130A, | | | | | |
| K169E, H188D | | | | | |
| R29D, Y31L, Q33H, K36G, M38I, | 1312 | 1925 | 2979 | 379558 | 213 (0.47) |
| T41A, M43R, M47T, L70Q, E81V, | | (0.04) | (0.01) | (0.04) | |
| L85R, K89N, A91T, F92P, K93V, | | | | | |
| R94L, T130A, H188D | | | | | |
| R29D, Y31L, Q33H, K36G, M38I, | 1428 | 2245 | 2842 | 631549 | 118 (0.26) |
| T41A, M43R, M47T, L70Q, E81V, | | (0.05) | (0.01) | (0.05) | |
| L85R, K89N, A91T, F92P, K93V, | | | | | |
| R94L, I118V, T120S, T130A, | | | | | |
| N149D, K169E, H188D | | | | | |
| H18L, R29D, Y31L, Q33H, K36G, | 1429 | 2759 | 2247 | 760438 | 157 (0.35) |
| M38I, T41A, M43R, M47T, L70Q, | | (0.06) | (0.01) | (0.06) | |
| E81V, L85R, K89N, A91T, F92P, | | | | | |
| K93V, R94L, I118V, T120S, | | | | | |
| T130A, K169E, H188D | | | | | |
| R29D, Y31L, Q33H, K36G, M38I, | 1430 | 1585 | 2736 | 456003 | 278 (0.62) |
| T41A, M43R, M47T, E81V, L85R, | | (0.03) | (0.01) | (0.03) | |
| K89N, A91T, F92P, K93V, R94L, | | | | | |
| I118V, T120S, I127T, C128Y, | | | | | |
| T130A, H188D | | | | | |
| R29D, Y31L, Q33H, K36G, M38I, | 1316 | 2633 | 3379 | 133095 | 190 (0.42) |
| T41A, M43R, M47T, E81V, L85R, | | (0.06) | (0.01) | (0.06) | |
| K89N, A91T, F92P, K93V, R94F, | | | | | |
| T130A, K169E | | | | | |
| H18L, R29D, Y31L, Q33H, K36G, | 1431 | 1732 | 2082 | 117465 | 174 (0.39) |
| M38I, T41A, M43R, M47T, E81V, | | (0.04) | (0.01) | (0.04) | |
| L85R, K89N, A91T, F92P, K93V, | | | | | |
| R94L, E99D, T130A | | | | | |
| H18L, R29D, Y31L, Q33H, K36G, | 1432 | 2011 | 2502 | 711479 | 232 (0.51) |
| M38I, T41A, M43R, M47T, L70Q, | | (0.04) | (0.01) | (0.04) | |
| E81V, L85R, K89N, A91T, F92P, | | | | | |
| K93V, R94L, I118V, T120S, | | | | | |
| T130A, K169E | | | | | |
| R29D, Y31L, Q33H, K36G, M38I, | 1319 | 2026 | 2443 | 572017 | 202 (0.45) |
| T41A, M43R, M47T, L70Q, E81V, | | (0.04) | (0.01) | (0.04) | |
| L85R, K89N, A91T, F92P, K93I, | | | | | |
| R94L, L97R, T130A | | | | | |
| R29D, Y31L, Q33H, K36G, M38I, | 1320 | 1296 | 2119 | 777509 | 101 (0.22) |
| T41A, M43R, M47T, L70Q, E81V, | | (0.03) | (0.01) | (0.03) | |
| L85R, K89N, A91T, F92P, K93I, | | | | | |
| R94L, L97R, T130A, L148S | | | | | |
| H18L, R29D, Y31L, Q33H, K36G, | 1321 | 1188 | 2161 | 190176 | 97 (0.22) |
| M38I, T41A, M43R, M47T, E81V, | | (0.03) | (0.01) | (0.03) | |
| L85R, K89N, | | | | | |
| A91T, F92P, K93V, R94L, I118V, | | | | | |
| T120S, I127T, T130A, K169E | | | | | |
| R29D, Y31L, Q33H, K36G, M38I, | 1433 | 1203 | 1863 | 217243 | 288 (0.64) |
| T41A, M43R, M47T, I61N, E81V, | | (0.03) | (0.01) | (0.03) | |
| L85R, K89N, A91T, F92P, K93V, | | | | | |
| R94F, V104A, I118V, T120S, | | | | | |
| I126V, T130A | | | | | |
| R29D, Y31L, Q33H, K36G, M38I, | 1434 | 1289 | 2625 | 124188 | 111 (0.25) |
| T41A, M43R, M47T, E81V, L85R, | | (0.03) | (0.01) | (0.03) | |
| K89N, A91T, F92P, K93V, R94F, | | | | | |
| I118V, T120S, T130A | | | | | |
| R29D, Y31L, Q33H, K36G, M38I, | 1435 | 1228 | 1973 | 145285 | 114 (0.25) |
| T41A, M43R, M47T, T62S, E81V, | | (0.03) | (0.01) | (0.03) | |
| L85R, K89N, A91T, F92P, K93V, | | | | | |
| R94L, I118V, T120S, T130A, | | | | | |
| K169E, T175A | | | | | |
| H18L, R29D, Y31L, Q33H, K36G, | 1325 | 1244 | 2091 | 109646 | 114 (0.25) |
| M38I, T41A, M43R, M47T, E81V, | | (0.03) | (0.01) | (0.03) | |
| L85R, K89N, A91T, F92P, K93V, | | | | | |
| R94L, F116S, T130A, H188D | | | | | |
| H18L, R29D, Y31L, Q33H, K36G, | 1436 | 1221 | 2251 | 89654 | 143 (0.32) |
| M38I, T41A, M43R, M47T, E81V, | | (0.03) | (0.01) | (0.03) | |
| L85R, K89N, A91T, F92P, K93V, | | | | | |
| R94L, I118V, T120S, I127T, | | | | | |
| T130A, L142S, H188D | | | | | |
| C16S, H18L, R29D, Y31L, Q33H, | 1437 | 1212 | 1800 | 4497 | 247 (0.55) |
| K36G, M38I, T41A, M43R, M47T, | | (0.03) | (0.01) | (0.03) | |
| E81V, L85R, K89N, A91T, F92P, | | | | | |
| K93V, R94L, T110A, I118V, | | | | | |
| H188D | | | | | |
| R29D, Y31L, Q33H, K36G, M38I, | 1438 | 2620 | 2241 | 66183 | 125 (0.28) |
| T41A, M43R, M47T, A91G, I118V, | | (0.06) | (0.01) | (0.06) | |
| T120S, I127T, T130A, H188D | | | | | |
| R29D, Y31L, Q33H, K36G, M38I, | 1439 | 1907 | 1726 | 3508 | 224 (0.50) |
| T41A, M43R, M47T, L70Q, D76G, | | (0.04) | (0.01) | (0.04) | |
| A91G, S103L, I118V, T120S, | | | | | |
| I127T, T130A | | | | | |
| Y53C, L85R, K89N, A91T, F92P, | 1440 | 1396 | 1459 | 2552 | 75 (0.17) |
| K93V, R94L, I118V, T120S, I127T, | | (0.03) | (0.01) | (0.03) | |
| T130A, K169E | | | | | |
| T62S, E81V, L85R, K89N, A91T, | 1441 | 2947 | 2377 | 179622 | 107 (0.24) |
| F92P, K93V, R94L, I118V, T120S, | | (0.06) | (0.01) | (0.06) | |
| T130A, K169E | | | | | |
| L70Q, A91G, I118V, T120S, | 1386 | 12262 | 90597 | 4168 | 115 (0.25) |
| T130A, K169E | | (0.27) | (0.01) | (0.27) | |
| R29D, Y31L, Q33H, K36G, M38I, | 1332 | 1696 | 9960 | 4067 | 87 (0.19) |
| T41A, M43R, M47T, E81V, L85R, | | (0.04) | (0.01) | (0.04) | |
| K89N, A91T, F92P, K93V, R94L, | | | | | |
| S129L, H188D | | | | | |
| Y53C/L70Q/D90G/T130A/N149D/ | 1442 | 1990 | 3106 | 3289 | 122 (0.27) |
| N152T/H188D | | (0.04) | (0.01) | (0.04) | |
| WT CD80 | 2 | 45607 | 883950 | 93079 | 451 (1.00) |
| | | (1.00) | (1.00) | (1.00) | |
| H18L, R29D, Y31L, Q33H, K36G, | 1443 | 16232 | 140241 | 182403 | 108 (0.96) |
| M38I, T41A, M43R, M47T, E81V, | | (0.26) | (0.88) | (2.61) | |
| L85R, K89N, A91T, F92P, K93V, | | | | | |
| R94L, I118V, T120S, I127T, | | | | | |
| T130A, H188D | | | | | |
| K89E, T130A | 1465 | 46923 | 225651 | 196544 | 317 (2.81) |
| | | (0.75) | (1.41) | (2.82) | |
| K89E, K93E, T130A | 1335 | 39137 | 181037 | 206713 | 571 (5.06) |
| | | (0.63) | (1.13) | (2.96) | |
| K89E, T130A | 1465 | 61349 | 156244 | 126961 | 2539 (22.53) |
| | | (0.99) | (0.98) | (1.82) | |
| WT CD80 | 2 | 62220 | 160148 | 69786 | 113 (1.00) |
| | | (1.00) | (1.00) | (1.00) | |
| S21P, R29D, Y31L, Q33H, K36G, | 1336 | 4467 | 4434 | 146638 | 137 (0.65) |
| M38I, T41A, M43R, M47T, N48I, | | (0.20) | (0.02) | (5.87) | |
| V68A, E81V, L85R, K89N, A91T, | | | | | |
| F92P, K93V, R94L,P109H, I126L, | | | | | |
| K169I | | | | | |
| H18L, R29D, Y31L, Q33H, K36G, | 1337 | 4523 | 4565 | 4731 | 18 (0.09) |
| M38I, T41A, M43R, M47T, P74L, | | (0.21) | (0.02) | (0.19) | |
| Y80N, E81V, L85R, K89N, A91T, | | | | | |
| F92P, K93V, R94L, L97R | | | | | |
| R29D, Y31L, Q33H, K36G, M38I, | 1338 | 4675 | 4686 | 4098 | 54 (0.26) |
| T41A, M43R, M47T, E81V, L85R, | | (0.21) | (0.02) | (0.16) | |
| K89N, A91T, F92P, K93V, R94L, | | | | | |
| S21P, P74L, Y80N, D90N, T130A, | | | | | |
| N149S, E162G | | | | | |
| R29D, Y31L, Q33H, K36G, M38I, | 1339 | 4413 | 4618 | 221788 | 51 (0.24) |
| T41A, M43R, M47T, E81V, L85R, | | (0.20) | (0.02) | (8.88) | |
| K89N, A91T, F92P, K93V, R94L, | | | | | |
| H18L, V68M, T130A | | | | | |
| R29D, Y31L, Q33H, K36G, M38I, | 1340 | 4354 | 4413 | 201513 | 80 (0.38) |
| T41A, M43R, M47T, E81V, L85R, | | (0.20) | (0.02) | (8.06) | |
| K89N, A91T, F92P, K93V, R94L, | | | | | |
| V68M, T130A, N149S, R190S | | | | | |
| R29D, Y31L, Q33H, K36G, M38I, | 1341 | 4381 | 4491 | 5075 | 8 (0.04) |
| T41A, M43R, M47T, E81V, L85R, | | (0.20) | (0.02) | (0.20) | |
| K89N, A91T, F92P, K93V, R94L, | | | | | |
| H18L, P74L, Y80N, T130A, R190S | | | | | |
| C16G, V22A, R29D, Y31L, Q33H, | 1342 | 4459 | 4582 | 4383 | 45 (0.21) |
| K36G, M38I, T41A, M43R, M47T, | | (0.20) | (0.02) | (0.18) | |
| E81V, L85R, K89N, A91T, F92P, | | | | | |
| K93V, R94L, V68M, D76G, I118T, | | | | | |
| T130A, S140T, N149S, K169I, | | | | | |
| H178R, N192D | | | | | |
| R29D, Y31L, Q33H, K36G, M38I, | 1343 | 4371 | 4613 | 247135 | 61 (0.29) |
| T41A, M43R, M47T, E81V, L85R, | | (0.20) | (0.02) | (9.89) | |
| K89N, A91T, F92P, K93V, R94F, | | | | | |
| E117V, I118T, N149S, S168G, | | | | | |
| H188Q | | | | | |
| V22A, R29D, Y31L, Q33H, K36G, | 1344 | 4222 | 4381 | 235307 | 96 (0.46) |
| M38I, T41A, M43R, M47T, E81V, | | (0.19) | (0.022) | (9.42) | |
| L85R, K89N, A91T, F92P, K93V, | | | | | |
| R94L, V68M, T130A | | | | | |
| R29D, Y31L, Q33H, K36G, M38I, | 1345 | 4216 | 4305 | 149085 | 30 (0.14) |
| T41A, M43R, M47T, E81V, L85R, | | (0.19) | (0.022) | (5.97) | |
| K89N, A91T, F92P, K93V, R94F, | | | | | |
| N64S, I118T, T130A, N149S, K169I | | | | | |
| R29D, Y31L, Q33H, K36G, M38I, | 1346 | 4361 | 4459 | 95558 | 88 (0.42) |
| T41A, M43R, M47T, E81V, L85R, | | (0.20) | (0.022) | (3.82) | |
| K89N, A91T, F92P, K93V, R94L, | | | | | |
| V22A, V68M, D115G, I118T, | | | | | |
| T130A, G133D, N149S | | | | | |
| S129P | 1347 | 4458 | 5914 | 6669 | 0 (0.0) |
| | | (0.20) | (0.03) | (0.27) | |
| A91G, S129P | 1348 | 5144 | 26635 | 13569 | 0 (0.0) |
| | | (0.23) | (0.12) | (0.54) | |
| I69T, L70Q, A91G, T120S | 1349 | 74296 | 203363 | 6242 | 509 (2.42) |
| | | (3.37) | (0.89) | (0.25) | |
| S129P | 1347 | 5086 | 8957 | 6603 | 125 (0.60) |
| | | (0.23) | (0.04) | (0.26) | |
| Y31H, S129P | 1350 | 4553 | 4874 | 5788 | 76 (0.36) |
| | | (0.21) | (0.02) | (0.23) | |
| WT CD80 | 2 | 22053 | 227691 | 24989 | 211 (1.00) |
| | | (1.00) | (1.00) | (1.00) | |
| T28A, R29D, Y31L, Q33H, K36G, | 1351 | 2636 | 2169 | 99658 | 116 (0.62) |
| M38I, T41A, M43R, M47T, E81V, | | (0.17) | (0.03) | (9.45) | |
| L85R, K89N, A91T, F92P, K93V, | | | | | |
| R94L, V104L, T130A, N149S | | | | | |
| H18L, R29D, Y31L, Q33H, K36G, | 1352 | 2680 | 2165 | 107747 | 125 (0.68) |
| M38I, T41A, M43R, M47T, E81V, | | (0.17) | (0.03) | (10.22) | |
| L85R, K89N, A91T, F92P, K93V, | | | | | |
| R94L, L97R, N149S, H188Q | | | | | |
| H18L, R29D, Y31L, Q33H, K36G, | 1444 | 2482 | 2179 | 100116 | 96 (0.52) |
| M38I, T41A, M43R, M47T, E81V, | | (0.16) | (0.03) | (9.50) | |
| L85R, K89N, A91T, F92P, K93V, | | | | | |
| R94L, L97R, T130A, N149S | | | | | |
| R29D, Y31L, Q33H, K36G, M38I, | 1354 | 2455 | 2084 | 11855 | 132 (0.71) |
| T41A, M43R, M47T, E81V, L85R, | | (0.15) | (0.03) | (1.12) | |
| K89N, A91T, F92P, K93V, R94L, | | | | | |
| H18L, V68A, T130A, N149S, T154I | | | | | |
| R29D, Y31L, Q33H, K36G, M38I, | 1355 | 2804 | 2310 | 216297 | 191 (1.03) |
| T41A, M43R, M47T, E81V, L85R, | | (0.18) | (0.03) | (20.51) | |
| K89N, A91T, F92P, K93V, R94L, | | | | | |
| A12G, V68A, L97R, T130A, L183H | | | | | |
| R29D, Y31L, Q33H, K36G, M38I, | 1356 | 2460 | 2188 | 109263 | 150 (0.81) |
| T41A, M43R, M47T, E81V, L85R, | | (0.15) | (0.03) | (10.36) | |
| K89N, A91T, F92P, K93V, R94L, | | | | | |
| I118T, T130A, S140T, N149S, | | | | | |
| K169S | | | | | |
| R29D, Y31L, Q33H, K36G, M38I, | 1357 | 2569 | 2198 | 100074 | 130 (0.70) |
| T41A, M43R, M47T, E81V, L85R, | | (0.16) | (0.03) | (9.49) | |
| K89N, A91T, F92P, K93V, R94L, | | | | | |
| I118T, T130A, N149S, K169I, | | | | | |
| Q193L | | | | | |
| R29D, Y31L, Q33H, K36G, M38I, | 1358 | 2500 | 2188 | 147900 | 124 (0.67) |
| T41A, M43R, M47T, E81V, L85R, | | (0.16) | (0.03) | (14.03) | |
| K89N, A91T, F92P, K93V, R94L, | | | | | |
| V22A, I118T, T130A, N149S | | | | | |
| R29D, Y31L, Q33H, K36G, M38I, | 1359 | 2615 | 2210 | 118150 | 89 (0.48) |
| T41A, M43R, M47T, E81V, L85R, | | (0.16) | (0.03) | (11.21) | |
| K89N, A91T, F92P, K93V, R94L, | | | | | |
| I118T, T130A, N149S | | | | | |
| R29D, Y31L, Q33H, K36G, M38I, | 1360 | 2444 | 2246 | 115420 | 101 (0.55) |
| T41A, M43R, M47T, E81V, L85R, | | (0.15) | (0.03) | (10.95) | |
| K89N, A91T, F92P, K93V, R94L, | | | | | |
| I118T, T130A, N149S, K169I | | | | | |
| R29D, Y31L, Q33H, K36G, M38I, | 1361 | 2378 | 2123 | 112712 | 114 (0.61) |
| T41A, M43R, M47T, E81V, L85R, | | (0.15) | (0.03) | (10.69) | |
| K89N, A91T, F92P, K93V, R94F, | | | | | |
| T130A, N149S, K169I | | | | | |
| I118T, C128R | 1362 | 3093 | 3180 | 2620 | 122 (0.66) |
| | | (0.19) | (0.03) | (0.25) | |
| Q27R, R29C, M42T, S129P, E160G | 1363 | 2827 | 2623 | 2326 | 139 (0.75) |
| | | (0.18) | (0.03) | (0.22) | |
| S129P, T154A | 1364 | 3062 | 2622 | 2606 | 156 (0.84) |
| | | (0.19) | (0.03) | (0.25) | |
| WT CD80 | 2 | 15948 | 75099 | 10544 | 185 (1.00) |
| | | (1.00) | (1.00) | (1.00) | |

### Example 26

### Pharmacokinetic/Pharmacodynamic Modeling and Dose Selection of CD80 Variant Molecules in Humans

[0975] This Example describes preclinical pharmacokinetic (PK) and pharmacodynamic (PD) modeling and simulation of exemplary tested variant CD80 IgV-Fc (inert) (H18Y/A26E/E35D/M47L/V68M/A71G/D90G; SEQ ID NO: 491) to inform dose selection in humans. The PK/PD relationship was modeled based on data obtained from non-tumor bearing mice and a syngeneic mouse tumor model of huPD-L1-expressing MC38 tumors, and human PK was predicted from cynomolgus monkey.

### A. Modeling of PK

### 1. PK Model

[0976] A PK model was designed as a two compartment model with intercompartmental distribution (Q) between the first compartment (Central Compartment, V1) and the second compartment (Peripheral Compartment, V2). To capture intraperitoneal (IP) or subcutaneous (SC) injection routes, a third compartment (Depot Compartment) was included with a first-order rate constant (Ka) linking the third compartment uni-directionally to the first compartment. The model also included a constant F to account for loss in the amount of drug available to diffuse from the third compartment (Depot Compartment) to the first compartment (Central Compartment, V1) due to IP or SC injection. The total amount of available drug in the third compartment (Depot Compartment) is described as F×Dose. For intravenous injections (IV), the third compartment (Depot Compartment) was omitted.

[0977] Drug clearance (CL) from the first compartment (Central Compartment, V1) was modeled differently for each species. In the mouse model, a time-dependent increase in clearance due to the formation of anti-drug antibodies was accounted for as follows:

[0978] when t≤6 days, CL=CL₀;

[0979] when t≥6 days, CLₜ=CL₀×(e^{β×(t-6 days)});
[0980] where t is time in days, CL₀ is the clearance at day 0, CLₜ is the clearance at day t, and β is a constant. For monkeys, linear clearance from the first compartment (Central Compartment, V1) was assumed.

[0981] a. Mouse Model of PK

[0982] Non-tumor bearing female C57BU6NJ mice were administered single doses of 20 or 100 μg of the exemplary variant CD80 IgV-Fc (H18Y/A26E/E35D/M47L/V68M/A71G/D90G) through intraperitoneal (IP) or intravenous injection (IV). Serial serum samples were analyzed for variant CD80 IgV-Fc concentration and the data were used to develop the mouse PK model.

[0983] FIG. 28A shows observed (circles) and predicted (solid lines) serum concentration for dose groups over time. FIG. 28B shows the goodness of fit for the mouse PK model. The results indicate that the two-compartment model with a first-order absorption and time-dependent clearance describes well (predicts) the PK profiles in mice by either IV or IP injections.

[0984] PK was also compared in tumor-bearing versus non-tumor-bearing mice. Female C57BU6NJ mice were implanted with murine colon adenocarcinoma (MC38) cells expressing human PD-L1 and animals were randomly assigned into treatment groups in two dose ranging studies when individual animal tumor volume reached ˜50 mm³. In one study (Study #1), groups of individual mice were administered either a single dose of 100 μg of the exemplary variant CD80 IgV-Fc (H18Y/A26E/E35D/M47L/V68M/A71G/D90G) or a single dose of 33 μg of the exemplary variant CD80 IgV-Fc (H18Y/A26E/E35D/M47L/V68M/A71G/D90G) every 7 days for a total of 3 doses (Q7D×3 doses). In another study (Study #2), groups of individual mice were administered a single dose of 100, 500, or 1500 μg of the exemplary variant CD80 IgV-Fc (H18Y/A26E/E35D/M47L/V68M/A71G/D90G), or were administered 167 μg of the exemplary variant CD80 IgV-Fc (H18Y/A26E/E35D/M47L/V68M/A71G/D90G) every 3 days for a total of 3 doses (Q3D×3 doses). All treatments were administered IP. PK was determined in tumor-bearing mice in all groups and compared to the predicted PK in non-tumor bearing mice.

[0985] FIGS. 29A-29F show observed (circles) and predicted (solid lines) serum concentration, including confidence intervals (dashed lines), for treatment groups over time. These data show that PK of the exemplary variant CD80 IgV-Fc (H18Y/A26E/E35D/M47L/V68M/A71G/D90G) in hPD-L1-MC38 tumor-bearing mice overlaps with the PK in the non-tumor bearing PK model prediction. These results are consistent with a finding that PK in tumor-bearing and non-tumor bearing mice are similar, such that PK parameters obtained from non-tumor bearing mice can be used for tumor PK/PD model.

TABLE E35
provides estimated PK parameters for the
mouse PK model.
Estimated PK parameters for mouse PK model

| | Mouse | |
|---|---|---|
| Parameter | Estimates | Unit |
| Ka | 4.53 | Day⁻¹ |
| V1 | 1.94 | mL |
| V2 | 8.88 | mL |
| CL | 1.34 | mL/day |
| Q | 26.5 | mL/day |
| β | 0.0685 | Day⁻¹ |

| | |
|---|---|
| F | 99% |

[0986] b. Monkey Model of PK

[0987] Female cynomolgus monkeys were administered single doses of 0.1, 1, and 10 mg/kg of the exemplary variant CD80 IgV-Fc (H18Y/A26E/E35D/M47L/V68M/A71G/D90G) by IV infusion (30 min) or 10 mg/kg of the exemplary variant CD80 IgV-Fc (H18Y/A26E/E35D/M47L/V68M/A71G/D90G) by SC injection. Serial serum samples were analyzed for concentration of the variant CD80 IgV-Fc fusion protein and the data were used to develop the monkey PK model.

[0988] FIG. 30A shows observed (circles) and predicted (solid lines) serum concentration for each dose group over time. FIG. 30B shows the goodness of fit for the monkey PK model. These results indicate that the two-compartment model with linear clearance can characterize PK in monkey.

TABLE E36
provides estimated PK parameters for the monkey
PK model.
Estimated PK parameters for monkey PK model

| | Monkey | |
|---|---|---|
| Parameter | Estimates | Unit |
| Ka | 0.728 | Day⁻¹ |
| V1 | 50.9 | mL/kg |
| V2 | 158 | mL/kg |
| CL | 31.4 | mL/kg/day |
| Q | 105 | mL/kg/day |

| | |
|---|---|
| F | 66.4% |

### B. Modeling of PD

### 1. Mouse Model of PD

[0989] To model PD in a mouse tumor model, a sequential parameter estimation procedure, using NONMEM v7.4.2, was utilized, in which mouse PK parameters were fixed and PD parameters were estimated using mouse tumor data. A model of tumor growth was characterized by using individual animal tumor growth data from vehicle control treated groups.

[0990] Female CD57BU6NJ mice were implanted with murine colon adenocarcinoma MC38 cells expressing human PD-L1, assigned into treatment groups and dosed with exemplary variant CD80 IgV-Fc (H18Y/A26E/E35D/M47L/V68M/A71G/D90G) as described above in study #1 and study #2.

[0991] PD was modeled according to the schematic below, in which a signal distribution model (SDM) was employed to account for the tumor growth function and tumor growth inhibition function in the presence of the exemplary tested variant CD80 IgV-Fc (see, e.g., Lobo, E D et al., AAPS PharmSci. 2002; 4(4):E42).

[chemical structure]

[0992] The SDM for PD included the following equations:

$$\frac{d R}{d T} = K g \times R - K 4 \times R \\ \frac{d K 1}{d t} = \frac{K - K 1}{τ} \\ \frac{d K 2}{d t} = \frac{K 1 - K 2}{τ} \\ \frac{d K 3}{d t} = \frac{K 2 - K 3}{τ} \\ \frac{d K 4}{d t} = \frac{K 3 - K 4}{τ} \\ K = \frac{K max \times {C}^{γ}}{{IC}_{50}^{γ} + {C}^{γ}}$$

where R represents tumor volume in mm³; K_{g} (day⁻¹) represents a first-order rate constant for net tumor growth; Kₘₐₓ (day⁻¹) represents the maximum kill rate constant; IC₅₀ (μg/mL) represents the drug concentration producing 50% of Kₘₐₓ; τ (day) is the mean transit time between compartments (e.g., K₁, K₂, K₃, and K₄, see schematic); γ is the Hill coefficient; f[Cp] (see schematic above) is the function of central compartment drug concentration change with time; a and g[R] (see schematic above) is the function of tumor growth change with time. In this model, the initial drug effect signal K is drug-concentration dependent. The initial effect signal is transduced through a cascade of transit compartments. At the end of transduction cascade, the initial drug effect results in the death of fraction of tumor cells.

[0993] A tumor static concentration (TSC), the minimum drug concentration where the tumor system is neither growing nor regressing, was calculated by the estimated PD parameters (Jumbe N L et al., J Pharmacokinet Pharmacodyn. 2010; 37:221), as follows:

$$TSC = {{IC}_{50} ( \frac{K g}{K max - K g} )}^{1 / γ}$$

[0994] FIGS. 31A (study #1) and 31B (study #2) show observed (triangles with line fit) and predicted (solid lines) median tumor volume (mm³) for dose groups over days. Estimated PK parameters are set forth in Table E37. The results are supportive of the ability of a simple exponential tumor growth model to describe the hPD-L1-MC38 tumor growth data; the estimated tumor doubling time was approximately 5.3 days. The delayed tumor growth inhibition by the exemplary variant CD80 IgV-Fc was adequately described by the SDM. The TSC was calculated as 10.6 μg/mL. The results are consistent with an observation that inhibition of tumor growth by the exemplary variant CD80 IgV-Fc (H18Y/A26E/E35D/M47L/V68M/A71G/D90G) is both dose- and exposure-dependent.

TABLE E37
shows estimated PD parameters.
Estimated PD parameters for mouse PD model

| Parameter | Value | Unit |
|---|---|---|
| Wₒ | 56.6 | mm³ |
| K_{g} | 0.135 | Day⁻¹ |
| Kₘₐₓ | 0.689 | Day⁻¹ |
| IC₅₀ | 19.5 | μg/mL |
| γ | 2.32 | |
| τ | 0.65 | day |

### C. Predicted Human PK and Dose Selection in First-In-Human Study

[0995] Human PK parameters were calculated based on allometric scaling of the estimated monkey PK parameters based on body weight, with scaling factor 0.8 for CL and Q, and a factor of 1 for the first and second compartments (V1 and V2, see section A above). A starting dose was determined based on predicted maximum human serum concentration and target saturation. Predicted human PK profiles in combination with model estimated PD target concentration (TSC) was used to predict dose regimens in humans. Modeling was based on an IV route of administration.

[0996] FIG. 32A shows the predicted target saturation with once weekly dosing (Q1W) of the exemplary tested variant CD80 IgV-Fc at different concentrations. Maximum target saturation was predicted to occur at the end of IV infusion. A starting dose of 0.003 mg/kg was determined to be the minimal anticipated biological effect level (MABEL) based on a predicted CD28 target saturation of 16% after the first IV dose of the variant CD80-IgV-Fc.

[0997] FIG. 32B shows the predicted human PK with once weekly dosing (Q1W) of the exemplary tested variant CD80 IgV-Fc at different concentrations, and FIG. 32C shows the predicted human PK with a dosing of the exemplary tested variant CD80 IgV-Fc every three weeks (Q3W) at different concentrations. Based on TSC, the projected clinical efficacious dose regimens were 1 to 3 mg/kg once a week (Q1W) and 3 to 10 mg/kg once every three weeks (Q3W).

### D. Conclusions

[0998] The translational strategy of combining non-clinical PK modeling/simulation and model-derived tumor static drug concentration (TSC) can be used to determine human dose selection. Transduction models, such as SDM described in this Example, may be used to inform immune-oncology biologic therapy.

### Example 27

### Assessment of Combination of CD80 Variant Molecule and Chemotherapeutic Agent in the MC38 Mouse Tumor Model

[0999] This Example describes the assessment of anti-tumor activity of exemplary tested variant CD80 IgV-Fc (inert) (variant CD80 IgV containing amino acid substitutions H18Y/A26E/E35D/M47L/V68M/A71G/D90G; SEQ ID NO: 491). To test the anti-tumor activity of the exemplary variant, it was evaluated alone or in combination with the platinum-based chemotherapeutic agent, oxaliplatin, in mice bearing human PD-L1-expressing MC38 tumors, which is a syngeneic mouse colon carcinoma solid tumor model.

[1000] The huPD-L1 MC38 cell line was generated by transducing parental MC38 cells with huPD-L1 using viral transduction. Eight-week old female C57/BL6NJ mice (The Jackson Laboratories, Sacramento, Calif.) were implanted subcutaneously with 0.5×10⁶ huPD-L1/MC38 cells. For injections, 0.1 mL of cells (0.5×10⁶ cells) were injected subcutaneously (SC) in the right mid-flank region.

[1001] On day 1, mice were randomized into four groups of 10 mice each, with all mice in each group having about equal mean tumor volumes (˜108 mm³). Tumors were measured with electronic calipers two-dimensionally twice weekly, beginning on day 7 post-tumor cell implant (referred to as “day 1”). Tumor volume was calculated as length×(width×2)×0.5, with the length being the longer of the two measurements. Beginning on day 1, the tested molecules were delivered through intraperitoneal (IP) injection, with a total of 3 doses of variant CD80 IgV-Fc delivered on days 1, 4, and 7 and oxaliplatin dosed on days 1, 8, and 15 as outlined in Table E38.

TABLE E38
Treatment Descriptions

| | | | | | Dose | Dose | |
|---|---|---|---|---|---|---|---|
| | | | | | Vol- | Schedule | Route |
| | | | | | ume | (D = | of |
| Group | # of | Test | Dose | | (mL/ | Study | Deliv- |
| # | Mice | Article(s) | Level | | kg) | Day) | ery |
| 1 | 10 | Fc control | 75 | μg | 5 | D1, D4, | IP |
| | | | | | | D7 | |
| 2 | 10 | Variant | 100 | μg | 5 | D1, D4, | IP |
| | | CD80 | | | | D7 | |
| | | IgV-Fc | | | | | |
| | | (H18Y/ | | | | | |
| | | A26E/ | | | | | |
| | | E35D/ | | | | | |
| | | M47L/ | | | | | |
| | | V68M/ | | | | | |
| | | A71G/D90; | | | | | |
| | | SEQ | | | | | |
| | | ID NO: | | | | | |
| | | 491) | | | | | |
| 3 | 10 | Fc control | 75 | μg | 5 | D1, D4, | IP |
| | | | | | | D7 | |
| | | Oxaliplatin | 5 | mg/kg | 10 | D1, D8, | IP |
| | | | | | | D15 | |
| 4 | 10 | Variant | 100 | μg | 5 | D1, D4, | IP |
| | | CD80 | | | | D7 | |
| | | IgV-Fc | | | | | |
| | | (H18Y/ | | | | | |
| | | A26E/ | | | | | |
| | | E35D/ | | | | | |
| | | M47L/ | | | | | |
| | | V68M/ | | | | | |
| | | A71G/D90; | | | | | |
| | | SEQ | | | | | |
| | | ID NO: | | | | | |
| | | 491) | | | | | |
| | | Oxaliplatin | 5 | mg/kg | 10 | D1, D8, | IP |
| | | | | | | D15 | |

[1002] Tumor growth inhibition (TGI) values for individual mice within each treatment group were calculated using tumor volumes from the last day in which all mice from each group were alive on study (day 25) using the following formula: [(mean Fc control tumor size −tumor size for individual mouse) divided by mean Fc control tumor size]×100.

[1003] As shown in FIG. 33, oxaliplatin alone was only modestly effective as monotherapy in huPD-L1+MC38 tumor-bearing mice, while variant CD80 IgV-Fc (inert) (H18Y/A26E/E35D/M47L/V68M/A71G/D90G) had potent antitumor activity in this model. When the chemotherapy was administered in combination with CD80 IgV-Fc (inert) (H18Y/A26E/E35D/M47L/V68M/A71G/D90G), significantly greater reductions in tumor growth over time were observed than with either of the agents alone. Although all groups had equal-sized tumors at the start of treatment (108 mm³), the median tumor volume for the group tested with the combination of CD80 IgV-Fc (inert) (H18Y/A26E/E35D/M47L/V68M/A71G/D90G) and oxaliplatin dropped to zero by eleven days after start of dosing

[1004] A percent mean tumor growth inhibition (TGI) among individual mice treated was also determined based on tumor volume from the last day in which all groups had at least 70% of mice still alive on study (day 25), using the formula [(mean Fc control tumor size −mean treated tumor size) divided by mean Fc control tumor size]×100). The anti-tumor activity of the combination as measured by TGI is shown in Table E39. As shown, 30% of the mice in the monotherapy group were tumor free by the end of the study. Three weekly doses of oxaliplatin given in combination with Fc control resulted in less potent anti-tumor activity than that observed for the monotherapy. There were no tumor-free mice in the Fc control+oxaliplatin group, but the differences of tumor growth and mean TGI values in that group versus Fc control alone were statistically significant. The combination of weekly oxaliplatin treatments with variant CD80 IgV-Fc (inert) (H18Y/A26E/E35D/M47L/V68M/A71G/D90G) dosing resulted in significantly superior anti-tumor activity compared to all other groups, with 90% of mice becoming tumor free and a mean TGI value of nearly 100%.

TABLE E39
Summary of Anti-Tumor Growth Activity

| | | | | | Mean | # (%) TF |
|---|---|---|---|---|---|---|
| Group | Test | Dose | | Dose | % TGI | Mice |
| # | Article | Level | | Schedule | (D25) | (D32) |
| 1 | Fc control | 75 | μg | D1, D4, D7 | 0 | 0/10 (0) |
| 2 | Variant | 100 | μg | D1, D4, D7 | 77.5 | 3/10 |
| | CD80 | | | | | (33%) |
| | IgV-Fc | | | | | |
| | (H18Y/ | | | | | |
| | A26E/ | | | | | |
| | E35D/ | | | | | |
| | M47L/ | | | | | |
| | V68M/ | | | | | |
| | A71G/ | | | | | |
| | D90G; | | | | | |
| | SEQ | | | | | |
| | ID NO: | | | | | |
| | 491) | | | | | |
| 3 | Fc control | 75 | μg | D1, D4, D7 | 41.2 | 0/10 (0) |
| | Oxaliplatin | 5 | mg/kg | D1, D8, D15 | | |
| 4 | Variant | 100 | μg | D1, D4, D7 | 98.6 | 9/10 |
| | CD80 | | | | | (90%) |
| | IgV-Fc | | | | | |
| | (H18Y/ | | | | | |
| | A26E/ | | | | | |
| | E35D/ | | | | | |
| | M47L/ | | | | | |
| | V68M/ | | | | | |
| | A71G/ | | | | | |
| | D90G; | | | | | |
| | SEQ | | | | | |
| | ID NO: | | | | | |
| | 491) | | | | | |
| | Oxaliplatin | 5 | mg/kg | D1, D8, D15 | | |

TGI = tumor growth inhibition;
TF = tumor free;
D = day;
IP = intraperitoneal.

[1005] These results indicate that variant CD80 IgV-Fc (inert) molecules with increased binding affinity for PD-L1, such as the exemplary variant containing amino acid substitutions H18Y/A26E/E35D/M47L/V68M/A71G/D90G, can be administered in the presence of a chemotherapeutic agent such as the exemplary platinum-based chemotherapeutic agents oxaliplatin, and that efficacy may be enhanced with the combination treatment.

### Example 28

### Assessment of Combination of CD80 Variant Molecule and Anti-CTLA-4 Antibody in the MC38 Mouse Tumor Model

[1006] This Example describes the assessment of anti-tumor activity of exemplary tested variant CD80 IgV-Fc (inert) (variant CD80 IgV containing amino acid substitutions H18Y/A26E/E35D/M47L/V68M/A71G/D90G; SEQ ID NO: 491). To test the anti-tumor activity of the exemplary variant, the variant CD80 IgV-Fc was evaluated alone or in combination an exemplary anti-mouse checkpoint antibody against CTLA-4 (anti-CTLA-4; clone 9D9) in mice bearing human PD-L1-expressing MC38 tumors, which is a syngeneic mouse colon carcinoma solid tumor model.

[1007] Eight-week old female C57/BL6NJ mice (The Jackson Laboratories, Sacramento, Calif.) were implanted subcutaneously with 1.5×10⁶ huPD-L1/MC38 cells (described in Example 27. On days 8, 11 or 14 post-tumor cell implant mice, the tested molecules were delivered through intraperitoneal (IP) injection as set forth in Table E40. Tumor volume was determined substantially as described in Example 27.

TABLE E40
Treatment Description

| Group | # of | | Dose |
|---|---|---|---|
| # | Mice | Test Article(s) | Level |
| 1 | 9 | Fc control | 75 μg |
| 2 | 9 | Variant CD80 | 150 μg |
| | | IgV-Fc | |
| | | (H18Y/A26E/E3 | |
| | | 5D/M47L/V68M/ | |
| | | A71G/D90; SEQ | |
| | | ID NO: 491) | |
| 3 | 9 | Anti-CTLA-4 | 100 μg |
| 4 | 9 | Variant CD80 | 150 μg |
| | | IgV-Fc | |
| | | (H18Y/A26E/E3 | |
| | | 5D/M47L/V68M/ | |
| | | A71G/D90; SEQ | |
| | | ID NO: 491) | |
| | | Anti-CTLA-4 | 100 μg |

[1008] As shown in FIG. 34, anti-CTLA-4 alone was only modestly effective as monotherapy in huPD-L1+MC38 tumor-bearing mice, while variant CD80 IgV-Fc (inert) (CD80 IgV H18Y/A26E/E35D/M47L/V68M/A71G/D90G, SEQ ID NO:491) had potent antitumor activity in this model. When the anti-CTLA-4 checkpoint inhibitor was administered in combination with CD80 IgV-Fc (inert) (H18Y/A26E/E35D/M47L/V68M/A71G/D90G), a significantly greater reduction in tumor growth over time was observed than with either agent alone. These results are consistent with a finding that variant CD80 IgV-Fc (inert) molecules with increased binding affinity for PD-L1, such as the exemplary variant containing amino acid substitutions H18Y/A26E/E35D/M47L/V68M/A71G/D90G, is compatible with as a combination therapy with checkpoint inhibitors and can improve the antitumor activity of other only modestly effective treatment modalities, such as checkpoint-only blockades.

### Example 29

### Assessment of the Mechanism of Action of Variant CD80 IgV-Fc

[1009] X-ray crystallography was used to elucidate the crystal structure of CD80 IgV domain of CD80 IgV-Fc (inert) (CD80 IgV H18Y/A26E/E35D/M47L/V68M/A71G/D90G; SEQ ID NO:491) to wild-type PD-L1. As shown in FIG. 35, the CD80 IgV:PD-L1 crystal structure (at a resolution of 3.15 Å) demonstrated a non-overlapping binding interface in which PD-L1 contact resides were distinct from the CD28:CD80 contacts. Residues involved in the interaction between CD80 and PD-L1 within 4.0 Å of each other were defined as interaction residues (M. D. Winn et al. Acta. Cryst. D 67, 235-242 (2011)) and included: CD80 residues Lys43, Glu44, Val45, Lys88, Asn89, Arg90, Thr91, Ile92, Asp94, Met102, Leu104, Gly105, Arg 107 and PD-L1 residues Ile54, Tyr56, Gln66, Val68, His69, Glu71, Arg113, Met115, Ile116, Ser 117, Gly120, Ala121, Asp122, Tyr123.

[1010] To further assess anti-tumor activity mechanistically, anti-tumor activity was evaluated in vivo using a human PD-L1-transduced MC38 tumor model substantially as described in Example 28, by combining CD80 IgV-Fc (inert) (H18Y/A26E/E35D/M47L/V68M/A71G/D90G; SEQ ID NO:491) treatment with anti-PD-L1 or anti-CD28 blocking antibodies. Anti-tumor activity was evaluated by serial tumor measurements. On days 8, 11 or 14 post-tumor cell implant mice, the tested molecules were delivered through intraperitoneal (IP) injection each alone or in combination at a concentration of 100 μg antibody or CD80 IgV-Fc.

[1011] As shown in FIG. 36A (anti-CD28) or FIG. 36B (anti-PD-L1), the variant CD80 IgV-Fc (inert) (H18Y/A26E/E35D/M47L/V68M/A71G/D90G) demonstrated activity superior to PD-L1 blockade alone, and coadministration with either anti-CD28 or anti-PD-L1 reduced the antitumor activity of the variant CD80 IgV-Fc (inert) monotherapy.

[1012] Together, these results are consistent with an observation that the CD80 IgV domain utilizes separate, non-competing epitopes to bind CD28 and PD-L1. The exemplary variant CD80 IgV-Fc (inert) (H18Y/A26E/E35D/M47L/V68M/A71G/D90G) is able to simultaneously engage PD-L1 on tumor cells and CD28 or CTLA-4 on T cells, conferring the unique abilities to block both the PD-L1 and CTLA-4 checkpoints as well as eliciting CD28 costimulation in the presence of PD-L1. Further, the superior activity of the exemplary variant CD80 IgV-Fc (inert) (H18Y/A26E/E35D/M47L/V68M/A71G/D90G) over checkpoint inhibitor-only therapies, such as anti-PD-L1, indicates that the ability of the variant CD80 IgV-Fc (inert) to both mediate checkpoint inhibition and CD28 costimulation may result in improved anti-tumor responses.

### Example 30

### Generation of CD80 IgV-Fc Secreted Immunomodulatory Protein (SIP) and Assessment of SIP Secretion, Bioactivity, and Binding

[1013] To generate a CD80 IgV-Fc secreted immunomodulatory protein (SIP), DNA encoding exemplary SIPs was obtained as gene blocks from Integrated DNA Technologies (Coralville, USA) and then cloned by Gibson assembly (New England Biolabs Gibson assembly kit) into a modified version of pRRL vector between restriction sites downstream of MND promoter. Exemplary SIP constructs were generated to encode a protein, including the signal peptide, and additionally a tag moiety. Specifically, the vector also encoded GFP, and a furin-linker-P2a sequence was placed between the DNA encoding the SIP and the DNA encoding the GFP allowing contiguous expression of the SIP and GFP proteins. The gene blocks had the following structure in order: 53 base pair overlap with signal peptide sequence upstream of Afe1 restriction site (ATGGGGTCAACCGCCATCCTCGCCCTCCTCCTGGCTGTTCTCCAAGGAGTCAGCGCT (SEQ ID NO: 1545)), encoding the signal peptide set forth as MGSTAILALLLAVLQGVSA (SEQ ID NO: 1546)); DNA sequence encoding SIP amino acid sequence set forth in Table E41 below, also including in all cases one or more linkers set forth in SEQ ID NO:1504 (3×GGGGS) or SEQ ID NO: 1522 (GSGGGGS): DNA encoding a human IgG1 Fc region modified to eliminate Fc effector function (SEQ ID NO:1518); 38 base pair overlap with coding sequence downstream of a unique Blp1 restriction site within DNA encoding a Furin cleavage site (RAKR); additional ORF sequences cloned in downstream of the Furin cleavage site that included in order: DNA encoding linker sequence (SSGSGGSG, SEQ ID NO: 1593); DNA encoding ribosomal skipping sequence P2a (ATNFSLLKQAGDVEENPGP, SEQ ID NO: 1594); DNA encoding GFP (MVSKGEELFTGVVPILVELDGDVNGHKFSVSGEGEGDATYGKLTLKFICTTGKLPVPWPTLVTT LTYGVQCFSRYPDHMKQHDFFKSAMPEGYVQERTIFFKDDGNYKTRAEVKFEGDTLVNRIELKG IDFKEDGNILGHKLEYNYNSHNVYIMADKQKNGIKVNFKIRHNIEDGSVQLADHYQQNTPIGDGP VLLPDNHYLSTQSALSKDPNEKRDHMVLLEFVTAAGITLGMDELYK, SEQ ID NO: 1582); TAA stop codon.

[1014] Exemplary generated SIP constructs are set forth in Table E41. As shown, bivalent and other multivalent, e.g. tetravalent formats were generated, including SIP version of exemplary multivalent formats described in Example 24.

TABLE E41
CD80 IgV-Fc Secreted Immunomodulatory Protein (SIP) Variants

| | CD80 | | Inert | |
|---|---|---|---|---|
| | IgV | | Fc | |
| | SEQ | CD80 IgV | SEQ | Inert Fc |
| Description | ID NO | Mutations | ID NO | Mutations |
| Control SIP: | 150 | — | 1518 | C220S, |
| Wildtype | | | | L234A, |
| CD80 IgV- | | | | L235E, and |
| GSG4S-Inert | | | | G237A |
| Fc | | | | |
| SIP 1: | 491 | H18Y, A26E, E35D, | 1518 | C220S, |
| Variant CD80 | | M47L, V68M, A71G, | | L234A, |
| IgV-GSG4S- | | and D90G | | L235E, and |
| Inert Fc | | | | G237A |
| SIP 2: | 765 or | E35D, D46V, M47L, | 1518 | C220S, |
| Variant CD80 | 976 | and V68M | | L234A, |
| IgV-GSG4S- | | | | L235E, and |
| Inert Fc | | | | G237A |
| SIP 3: | 1176 | H18Y, E35D, M47V, | 1518 | C220S, |
| Variant CD80 | or | V68M, and A71G | | L234A, |
| IgV-GSG4S- | 1207 | | | L235E, |
| Inert Fc | | | | and G237A |
| SIP 4: | 1187 | H18Y, A26P, E35D, | 1518 | C220S, |
| Variant CD80 | or | M47I, V68M, | | L234A, |
| IgV-GSG4S- | 1218 | and A71G | | L235E, |
| Inert Fc | | | | and G237A |
| SIP 5: | 491 | H18Y, A26E, E35D, | 1518 | C220S, |
| Variant CD80 | | M47L, V68M, | | L234A, |
| IgV-GSG4S | | A71G, and D90G | | L235E, |
| Inert Fc- | | | | and G237A |
| 3xG4S- | | | | |
| Variant CD80 | | | | |
| IgV | | | | |
| SIP 6: | 491 | H18Y, A26E, E35D, | 1518 | C220S, |
| Variant CD80 | | M47L, | | L234A, |
| IgV-3xG4S- | | V68M, A71G, | | L235E, |
| Variant | | and D90G | | and G237A |
| CD80 IgV- | | | | |
| GSG4S-Inert | | | | |
| Fc | | | | |

[1015] To prepare lentiviral vectors, 4×10⁶ HEK293 cells were plated per 100 mm dish. On the next day, 4.5 μg of P-Mix (3 μg of PAX2 and 1.5 μg of pMD2G) was added to 6 μg of DNA encoding the SIPs constructs in a 5 mL polypropylene tube. Diluent buffer (10 mM HEPES/150 mM NaCl pH7.05/1L TC grade H20) was added to the tube to bring up the total volume of 500 μL. To the diluent DNA (PEI:total DNA 4:1), 42 μL of PEI (1 μg/μL) was added and mixed by vortexing. The mixture was incubated at room temperature for 10 minutes and cells were prepared by aspirating medium from the dish gently without disturbing the adherent cells, then replaced with 9 mL of Opti-MEM (1×). DNA/PEI mixture was then added to the dish and incubated at 37° C. for 24 hours. After 24 hours, media was aspirated from the dishes and replaced with 10 mL of fresh DMEM media and then incubated at 37° C. Viral supernatant was collected after 48 hours using a syringe attached to a 0.45 μm filter PES to remove cells and debris from the culture (Thermo Scientific Nalgene Syringe Filter).

[1016] Jurkat cells and donor Pan T-cells were transduced with the viral vectors encoding the CD80 IgV-Fc SIPs. Pan T-cells were thawed and activated with anti-CD3/anti-CD28 beads (Dynal) at a 1:1 ratio. Cells (1×10⁶ cells) were mixed with supernatant containing lentiviral particles encoding the indicated CD80 IgV-Fc SIPs with concentrations adjusted for a targeted MOI of 0.7. As a control, cells were transduced with a mock vector control. Transduction was performed in the presence of 8 μg/mL polybrene and 100 IU/mL IL-2. Cells were spun down at 1000 g for 30 min at 30° C. After 24 hours, 0.8 mL of media was removed from each well and replaced with fresh Xvivo15 plus media and IL2. The cells were fed every two days with fresh media and cytokines.

[1017] Starting on Day 2 after transduction, the culture supernatant from transduced cells above was collected daily for ELISA assays. Samples for ELISA assays included undiluted supernatant from transduced cells and 1:3 serial dilutions thereof, and a standard curve for determining supernatant SIP concentration was generated using 50 ng/mL of purified recombinant SIP protein and 1:3 serial dilutions thereof. As shown in FIG. 37, SIP proteins were detected in supernatant samples from transduced Pan T-cells from two different donors, but were not detected in supernatant samples from mock transduced cells.

[1018] To assess the capacity of CD80 IgV-Fc SIPs to modulate CD28 costimulation, a Jurkat/IL-2 reporter assay was performed substantially as described in Example 9. Jurkat effector cells expressing an IL-2-luciferase reporter were co-cultured with K562-derived artificial antigen presenting cells (aAPC) displaying transduced cell surface anti-CD3 single chain Fv (OKT3) and PD-L1. CD28 costimulation was assessed upon addition of a purified CD80 IgV-Fc protein control (SIP 1 from Table E41) starting at 25 nM and 1:3 serial dilutions thereof as well as undiluted supernatants and 1:3 serial dilutions thereof from SIP-transduced cells seven days after transduction.

[1019] As shown in FIG. 38, exposure to SIP-containing supernatant resulted in increased CD28 costimulation and downstream signal transduction leading to activation of the IL-2 promoter with consequent luciferase induction from the reporter cell line. CD28 costimulation EC50 values for Jurkat- and Pan T-cell-secreted SIPs are presented in Table E42 below. Increased CD28 costimulation (as measured by luciferase activity) and a lower EC50 was observed for the multivalent SIP formats set forth as exemplary SIP 5 and SIP 6.

TABLE E42
CD28 Costimulation EC50 Values for Jurkat- and Pan
T-Cell-Secreted SIPs

| | | EC50 (pM) | EC50 (pM) |
|---|---|---|---|
| | EC50 (pM) | Donor 1 | Donor 2 |
| SIP Variant | Jurkat cells | Pan T-cells | Pan T-cells |
| SIP 1 (Purified) | 197 | 121 | 197 |
| SIP 1 (Supernatant) | 538 | 314 | 538 |
| SIP 2 (Supernatant) | 750 | 282 | 750 |
| SIP 3 (Supernatant) | 961 | 294 | 961 |
| SIP 4 (Supernatant) | 221 | 153 | 221 |
| SIP 5 (Supernatant) | 27 | 73 | 27 |
| SIP 6 (Supernatant) | 21 | 39 | 21 |

[1020] A cell-binding assay was performed to assess the binding of CD80 IgV-Fc SIPs to PD-L1-expressing K562-derived aAPCs. K562/OKT3/PD-L1+ cells were incubated with purified CD80 IgV-Fc SIPs at a starting concentration of 5 μg/mL and at 1:3 serial dilutions thereof. Bound CD80 IgV-Fc SIPs were detected using flow cytometry. SIP-binding standard curves and EC50 values are shown in FIG. 39.

[1021] Together, the results are consistent with an observation that T cells engineered to express soluble CD80-IgV SIP will block PD-L1 and PD1 interaction and engage CD28 costimulatory signal in a PDL1I-dependent manner. The results further confirm the increased potency of multivalent formats for inducing CD28-mediated costimulation.

### Example 31

### Assessment of Binding Activity of CD80 ECD-Fc Variants

[1022] CD80 ECD-Fc proteins were constructed with CD80 variants identified from the screens described above. Fusion proteins containing the full extracellular domain (ECD) of CD80 set forth in SEQ ID NO:2 in which is contained noted amino acid substitutions were fused to a human IgG1 Fc that has effector activity. As a control, an Fc fusion protein containing the ECD of wild-type CD80 set forth in SEQ ID NO:2 also was generated. The exemplary generated molecules included CD80 (A91G/I118V/T120S/T130A) ECD-Fc, CD80 (S21P/L70Q/D90G/I118V/T120S/T130A) ECD-Fc, CD80 (E88D/K89R/D90K/A91G/F92Y/K93R) ECD-Fc, CD80 (E35D/D46E/M47V/V68M/D90G/K93E) ECD-Fc, and a wildtype CD80 ECD-Fc. The effector Fc, which is set forth in SEQ ID NO:1527 also included the mutation C220S by EU numbering (corresponding to C5S of the Fc) and further contained removal of the C-terminal lysine, K447del by EU numbering (corresponding to deletion of position 232) with reference to wild-type human IgG1 Fc (set forth in SEQ ID NO: 1502).

[1023] The CD80-ECD-Fc variants were tested for binding to cell-expressed binding partners substantially as described in Example 7. The EC50 for binding also was determined. The results for binding are provided in Table E43. As shown, when formatted with the full ECD, all tested variant molecules exhibited a very low level of binding to PD-L1 similar to the wild-type CD80 ECD, such that the degree of binding was determined to represent substantially no detectable binding to PD-L1. In contrast, all exemplary molecules exhibited increased binding affinity to CTLA-4 compared to wild-type CD80 and, in some cases, an increase in binding affinity for CD28.

TABLE E43
Flow Binding to CHO cells stably expressing CTLA4
or PD-L1 and Jurkats (CD28)

| | | Binding to Transfected Cells | | | | | |
|---|---|---|---|---|---|---|---|
| | | CHO/ | | Jurkat/ | | CHO/ | |
| | | CTLA4 | | CD28 | | PD-L1 | |
| | | MFI | | MFI | | MFI | |
| | | at | | at | | at | |
| Protein | SEQ | 66.7 | EC50 | 66.7 | EC50 | 66.7 | EC50 |
| Description | ID NO | nM | (nM) | nM | (nM) | nM | (nM) |
| CD80 (A91G/ | 1390 | 24801 | 4.3 | 720 | >200 | 107 | No |
| I118V/ | | | | | | | |
| T120S/T130A) | | | | | nM | | Bind |
| ECD-Fc | | | | | | | |
| CD80 | 1541 | 27021 | 8.8 | 282 | >200 | 103 | No |
| (S21P/L70Q/ | | | | | nM | | Bind |
| D90G/I118V/ | | | | | | | |
| T120S/T130A) | | | | | | | |
| ECD-Fc | | | | | | | |
| CD80 (E88D/ | 1494 | 26384 | 3.6 | 4049 | >200 | 108 | No |
| K89R/D90K/ | | | | | nM | | Bind |
| A91G/F92Y/ | | | | | | | |
| K93R) | | | | | | | |
| ECD-Fc | | | | | | | |
| CD80 (E35D | 307 | 24566 | 10.5 | 343 | >200 | 287 | No |
| /D46E/M47V/ | | | | | nM | | Bind |
| V68M/D90G/ | | | | | | | |
| K93E) | | | | | | | |
| ECD-Fc | | | | | | | |
| Wildtype CD80 | 2 | 25337 | 4.0 | 120 | >200 | 104 | No |
| ECD-Fc | | | | | nM | | Bind |
| CD80 | 299 | 17820 | 3.9 | 5136 | 11.8 | 15065 | 14.5 |
| (H18Y/A26E/ | | | | | | | |
| E35D/M47L/ | | | | | | | |
| V68M/A71G/ | | | | | | | |
| D90G) | | | | | | | |
| IgV-Fc1.1 | | | | | | | |
| Human IgG1 | | | No | | No | | No |
| Isotype | | 69.4 | Bind | 73.2 | Bind | 96.4 | Bind |
| Control | | | | | | | |

[1024] The bioactivity of the generated molecules also was assessed using a Jurkat report assay as described in Examples 9 to assess CD28 costimulation of the molecules. In this assay, the artificial antigen presenting cells (K562/OKT3) did not express PD-L1. The results from the Jurkat reporter assay are provided in Table E44 and FIG. 40. As shown, the generated variants CD80 molecules exhibited an increase in CD28 costimulation in this assay compared to wild-type CD80, which was dose-dependent. This result indicates that these molecules were able to mediate CD28 agonism.

TABLE E44
Jurkat/IL2 + CHO/OKT3 Reporter Assay:
Relative Luciferase Units (RLU)

| | | Relative Luminescence at each | | | | | |
|---|---|---|---|---|---|---|---|
| | SEQ | concentration (RLU) | | | | | |
| | ID | 100000 | 25000 | 6250 | 1563 | 391 | 98 |
| Protein Description | NO | pM | pM | pM | pM | pM | pM |
| CD80 (A91G/I118V/ | 1390 | 2750 | 2209 | 1761 | 1288 | 1119 | 1098 |
| T120S/T130A) | | | | | | | |
| ECD-Fc | | | | | | | |
| CD80 | 1541 | 2197 | 1730 | 1203 | 1049 | 993 | 1042 |
| (S21P/L70Q/D90G/ | | | | | | | |
| I118V/T120S/T130A) | | | | | | | |
| ECD-Fc | | | | | | | |
| CD80 (E88D/K89R/ | 1494 | 3434 | 3162 | 2338 | 1594 | 1258 | 998 |
| D90K/A91G/ | | | | | | | |
| F92Y/K93R) | | | | | | | |
| ECD-Fc | | | | | | | |
| CD80 | 307 | 2046 | 1558 | 1213 | 1022 | 939 | 949 |
| (E35D/D46E/M47V/ | | | | | | | |
| V68M/D90G/K93E) | | | | | | | |
| ECD-Fc | | | | | | | |
| Wildtype CD80 | 2 | 1454 | 1228 | 1012 | 984 | 976 | 915 |
| ECD-Fc | | | | | | | |
| Human IgG1 | | 965 | 835 | 845 | 754 | 828 | 894 |
| Isotype Ctl | | | | | | | |

[1025] The present invention is not intended to be limited in scope to the particular disclosed embodiments, which are provided, for example, to illustrate various aspects of the invention. Various modifications to the compositions and methods described will become apparent from the description and teachings herein. Such variations may be practiced without departing from the true scope and spirit of the disclosure and are intended to fall within the scope of the present disclosure.

The application's sequence listing, which the Patent Office published only in electronic form, follows.

SEQUENCE LISTING (1594 sequences)

SEQ ID NO: 1 - protein, 288 aa, Homo sapiens
  MISC_FEATURE: CD80(B7-1)
MGHTRRQGTSPSKCPYLNFFQLLVLAGLSHFCSGVIHVTKEVKEVATLSCGHNVSVEELAQTRIYWQKEKKMVLTMMSGDMNIWPEYKNRTIFDITNNLSIVILALRPSDEGTYECVVLKYEKDAFKREHLAEVTLSVKADFPTPSISDFEIPTSNIRRIICSTSGGFPEPHLSWLENGEELNAINTTVSQDPETELYAVSSKLDFNMTTNHSFMCLIKYGHLRVNQTFNWNTTKQEHFPDNLLPSWAITLISVNGIFVICCLTYCFAPRCRERRRNERLRRESVRPV

SEQ ID NO: 2 - protein, 208 aa, Homo sapiens [sequence omitted]

SEQ ID NO: 3 - protein, 208 aa, Artificial Sequence
  CD80 v122 ECD
VIHVTKEVKEVATLSCGHNVSVEELAQTRIYWQKEKKMVLTMMSGDMNIWPEYKNRTIFDITNNLSIVIPALRPSDEGTYECVVLKYEKDAFKREHLAEVTLSVKADFPTPSISDFETPTSNIRRIICSTSGGFPEPHLSWLENGEELNAINTTVSQDPETELYAVSSKLDFNMTTNHSFMCLIKYGHLRVNQTFNWNTTKQEHFPDN

SEQ ID NO: 4 - protein, 208 aa, Artificial Sequence
  CD80 v123 ECD
VIHVTKEVKEVATLSCGHNVSVEELAQTRFYWQKEKKMVLTMMSGDMNIWPEYKNRTIFDITNNLSIVIPALRPSDEGTYECVVLKYEKDAFKREHLAEVTLSVKADFPTPSISDFETPTSNIRRIICSTSGGFPEPHLSWLENGEELNAINTTVSQDPETELYAVSSKLDFNMTTNHSFMCLIKYGHLRVNQTFNWNTTKQEHFPDN

SEQ ID NO: 5 - protein, 208 aa, Artificial Sequence
  CD80 v124 ECD
VIHVTKEVKEVATLSCGHNVSVEELAHTRIYWQKEKKMVLSMMSGDMNIWPEYKNRTIFDITNNLSIVILDLRPSDEGTYECVVLKYEKDAFKREHLAEVTLSVKADFPTPSISDFETPTSNIRRIICSTSGGFPEPHLSWLENGEELNAINTTVSQDPETELYAVSSKLDFNMTTNHSFMCLIKYGHLRVNQTFNWNTTKQEHFPDN

SEQ ID NO: 6 - protein, 208 aa, Artificial Sequence
  CD80 v125 ECD
VIHVTKEVKEVATLSCGHNVSVEELAQTRTYWQKEKKMVLTMMSGDMNIWPEYKNRTIFDITNNLSIVIRALRPSDEGTYECVVLKYEKDAFKREHLAEVTLSVKADFPTPSISDFETPTSNIRRIICSTSGGFPEPHLSWLENGEELNAINTTVSQDPETELYAVSSKLDFNMTTNHSFMCLIKYGHLRVNQTFNWNTTKQEHFPDN

SEQ ID NO: 7 - protein, 208 aa, Artificial Sequence
  CD80 v126 ECD
VIHVTKEVKEVARLSRGHNVSVEELAQTRIYWQKEKKMVLTMMSGDMNIWPEYKNRTIFDITNNLSIVIQDLRPSDEGTYECVVLKYEKDAFKREHLAEVTLSVKADFPTPSISDFETPTSNIRRIICSTSGGFPEPHLSWLENGEELNAINTTVSQDPETELYAVSSKLDFNMTTNHSFMCLIKYGHLRVNQTFNWNTTKQEHFPDN

SEQ ID NO: 8 - protein, 208 aa, Artificial Sequence
  CD80 v127 ECD
VIHVTKEVKEVATLSCGHNVSVEELAQTRIYWQKEKKMVLTMMSGDMNIWPEYKNRIIFDITNNLSIVILALRPSDEGTYECVVLKYEKDAFKREHLAEVTLSVKADFPTPSISDFETPTSNIRRIICSTSGGFPEPHLSWLENGEELNAINTTVSQDPETELYAVSSKLDFNMTTNHSFMCLIKYGHLRVNQTFNWNTTKQEHFPDN

SEQ ID NO: 9 - protein, 208 aa, Artificial Sequence
  CD80 v128 ECD
VIHVTKEVKEVATLSCGHNVSVEELAQTRIYWQKEKKMVLTMISGDMNIWPEYKNRTIFDITNNLSIVILALRPSDEGTYERVVLKYEKDAFKREHLAEVTLSVKADFPTPSISDFETPTSNIRRIICSTSGGFPEPHLSWLENGEELNAINTTVSQDPETELYAVSSKLDFNMTTNHSFMCLIKYGHLRVNQTFNWNTTKQEHFPDN

SEQ ID NO: 10 - protein, 208 aa, Artificial Sequence
  CD80 v130 ECD
VIHVTKEVKEVATLSCGHNVSLEELAQTRIYWQKEKKVVLTMMSGDTNIWPEYKNRTIFDITNNLSIVILDLRPSDEGTYECVVMKYEKDAFKREHLAEVTLSVKADFPTPSISDFETPTSNIRRIICSTSGGFPEPHLSWLENGEELNAINTTVSQDPETELYAVSSKLDFNMTTNHSFMCLIKYGHLRVNQTFNWNTTKQEHFPDN

SEQ ID NO: 11 - protein, 208 aa, Artificial Sequence
  CD80 v131 ECD
VIHVTKEVKEVATLSCGHNVSVEELAQTRVYWQKEKKMVLTMMSGDMNIWPEYKNRIIFDITNNLSIVIPDLRPSDEGTYECVVLKYEKDTFKREHLAEVTLSVKADFPTPSISDFETPTSNIRRIICSTSGGFPEPHLSWLENGEELNAINTTVSQDPETELYAVSSKLDFNMTTNHSFMCLIKYGHLRVNQTFNWNTTKQEHFPDN

SEQ ID NO: 12 - protein, 208 aa, Artificial Sequence
  CD80 v132 ECD
VIHVTKEVKEVATLSCGHNVSIEELAQTRIYWQKEKKMVLTMMSGDMNIWPEYKNRTIFDITNNLSIVIMDLRPSDEGTYECVVLKYEKDAFKREHLAEVTLSVKADFPTPSISDFETPTSNIRRIICSTSGGFPEPHLSWLENGEELNAINTTVSQDPETELYAVSSKLDFNMTTNHSFMCLIKYGHLRVNQTFNWNTTKQEHFPDN

SEQ ID NO: 13 - protein, 208 aa, Artificial Sequence
  CD80 v133 ECD
VIHVTKEVKEVATLSCGHNVSVEELAQTRIYWQKEKKMVLTMMSGDMNIWPEYKDRTIFDITNNLSIVIPALRPSDGGTYECVVLKYEKDAFKREHLAEVTLSVKADFPTPSISDFETPTSNIRRIICSTSGGFPEPHLSWLENGEELNAINTTVSQDPETELYAVSSKLDFNMTTNHSFMCLIKYGHLRVNQTFNWNTTKQEHFPDN

SEQ ID NO: 14 - protein, 208 aa, Artificial Sequence
  CD80 v134 ECD
VIHVTKEVKEVATLSCGHNVSVEELAQTRIYWQKEKKMVLTMMSGDMNIWPEYKNRAIFDITNNLSIVTLALRPSDEGTYECVVLKYEKDAFKREHLAEVTLSVKADFPTPSISDFETPTSNIRRIICSTSGGFPEPHLSWLENGEELNAINTTVSQDPETELYAVSSKLDFNMTTNHSFMCLIKYGHLRVNQTFNWNTTKQEHFPDN

SEQ ID NO: 15 - protein, 208 aa, Artificial Sequence
  CD80 v135 ECD
VIHVTKEVKEVATLSCGHNVSVEELAQTRIYWQKEKKMVLTMMSGDMNIWPEYKDRTIFDITNNLSIVILALRPSDEGTYECVVLMYEKDAFKREHLAEVTLSVKADFPTPSISDFETPTSNIRRIICSTSGGFPEPHLSWLENGEELNAINTTVSQDPETELYAVSSKLDFNMTTNHSFMCLIKYGHLRVNQTFNWNTTKQEHFPDN

SEQ ID NO: 16 - protein, 208 aa, Artificial Sequence
  CD80 v136 ECD
VIHVTKEVKEVATLSCGHNVSVEELAQTRIYWQKEKKMVLTMMSGDMNIWPEYKNRTIFDITNNLSIVILAPRPSDEGIYECVVLKYEKDAFKREHLAEVTLSVKADFPTPSISDFETPTSNIRRIICSTSGGFPEPHLSWLENGEELNAINTTVSQDPETELYAVSSKLDFNMTTNHSFMCLIKYGHLRVNQTFNWNTTKQEHFPDN

SEQ ID NO: 17 - protein, 208 aa, Artificial Sequence
  CD80 v137 ECD
VIHVTKEVKEVATLSCGHNVSVEELAQTRIYWQKEKKMVLTMMSGDMNIWPEYKNRTIFDITNNLSIVIPALRPSDEGTYECVVLKYEKDASKREHLAEVTLSVKADFPTPSISDFETPTSNIRRIICSTSGGFPEPHLSWLENGEELNAINTTVSQDPETELYAVSSKLDFNMTTNHSFMCLIKYGHLRVNQTFNWNTTKQEHFPDN

SEQ ID NO: 18 - protein, 208 aa, Artificial Sequence
  CD80 v138 ECD
VIHVTKEVKEVATLSCGHNVSVEELAQTRIYWQKEKKMVLTMMSGDMNIWPEYKNRTIFDITNNLSIVILALRPSDEGPYECVVLKYEKDAFKREHLAEVTLSVKADFPTPSISDFETPTSNIRRIICSTSGGFPEPHLSWLENGEELNAINTTVSQDPETELYAVSSKLDFNMTTNHSFMCLIKYGHLRVNQTFNWNTTKQEHFPDN

SEQ ID NO: 19 - protein, 208 aa, Artificial Sequence
  CD80 v139 ECD
VIHVTKEVKEVATLSCGHNVSVEELAQTRIYWQKDKKMVLTMMSGDINIWPEYKNRTIFDITNNPSIVILALRPSDEGTYECVVLKYEKNAFKREHLAEVTLSVKADFPTPSISDFETPTSNIRRIICSTSGGFPEPHLSWLENGEELNAINTTVSQDPETELYAVSSKLDFNMTTNHSFMCLIKYGHLRVNQTFNWNTTKQEHFPDN

SEQ ID NO: 20 - protein, 208 aa, Artificial Sequence
  CD80 v140 ECD
VIHVTKEVKEVATLSCGHNVSVEESAQTRIYWQKDKKMVLTMMSGDINIWPEYKNRTIFDITNNLSIVILALRPSDEGTYECVVLKYEKNAFKREHLAEVTLSVKADFPTPSISDFETPTSNIRRIICSTSGGFPEPHLSWLENGEELNAINTTVSQDPETELYAVSSKLDFNMTTNHSFMCLIKYGHLRVNQTFNWNTTKQEHFPDN

SEQ ID NO: 21 - protein, 208 aa, Artificial Sequence
  CD80 v141 ECD
VIHVTKEVKEVATLSCGHNVSVEELAQTRIYWQKEKKMVLTMMPGDMNIWPEYKNRTIFDITNNLSTVILALRSSDEGTYGCVVLKYEKDAFKRDHLAEVTLSVKADFPTPSISDFETPTSNIRRIICSTSGGFPEPHLSWLENGEELNAINTTVSQDPETELYAVSSKLDFNMTTNHSFMCLIKYGHLRVNQTFNWNTTKQEHFPDN

SEQ ID NO: 22 - protein, 208 aa, Artificial Sequence
  CD80 v142 ECD
VIHVTKEVKEVATLSCGHNVSVEELAQTRIYWQKEKKMVLTMMSGDMNIWPEYKNRTIFDITNNLSIVILDLRPSDEGTYECVVLKYEKDAFKREHLAEVTLSVKADFPTPSISDFETPTSNIRRIICSTSGGFPEPHLSWLENGEELNAINTTVSQDPETELYAVSSKLDFNMTTNHSFMCLIKYGHLRVNQTFNWNTTKQEHFPDN

SEQ ID NO: 23 - protein, 208 aa, Artificial Sequence
  CD80 v143 ECD
VIHVTKEVKEVAALSCGHNVSVEELAQTRIYWQKEKKMVLTMMSGDMNIWPEYKNRTIFDNTNNLSIVILDLRPSDEGTYECVVLKYEKDAFKREHLAEVTLSVKADFPTPSISDFETPTSNIRRIICSTSGGFPEPHLSWLENGEELNAINTTVSQDPETELYAVSSKLDFNMTTNHSFMCLIKYGHLRVNQTFNWNTTKQEHFPDN

SEQ ID NO: 24 - protein, 208 aa, Artificial Sequence
  CD80 v144 ECD
VIHVTKEVKEVATLSCGHNVSVEELAQTRIYWQKEKKMVLTMMSGDMNIWPEYKNRTIFDITNNLSIVILALRPSDEGTYKCVVLKYEKDSFKREHLAEVTLSVKADFPTPSISDFETPTSNIRRIICSTSGGFPEPHLSWLENGEELNAINTTVSQDPETELYAVSSKLDFNMTTNHSFMCLIKYGHLRVNQTFNWNTTKQEHFPDN

SEQ ID NO: 25 - protein, 208 aa, Artificial Sequence
  CD80 v145 ECD
VIHVTKEVKEVVTLSCGHNVSVEELAQTRIYWQKEKKMVLTMMSGDVNIWPEYKNRTIFDITNNLSIVIMALRPSDEGTYECVVLKYEKDAFKREHLAEVTLSVKADFPTPSISDFETPTSNIRRIICSTSGGFPEPHLSWLENGEELNAINTTVSQDPETELYAVSSKLDFNMTTNHSFMCLIKYGHLRVNQTFNWNTTKQEHFPDN

SEQ ID NO: 26 - protein, 208 aa, Artificial Sequence
  CD80 v146 ECD
VIHVTKEVKEVATLSCGHNVSVEELAQTRIYWQEEKKMVLAMMSGDMNIWPEYKNRTIFDITNNLSIVILAVRPSDEGTYECVVLKYEKDAFKREHLAEVTLSVKADFPTPSISDFETPTSNIRRIICSTSGGFPEPHLSWLENGEELNAINTTVSQDPETELYAVSSKLDFNMTTNHSFMCLIKYGHLRVNQTFNWNTTKQEHFPDN

SEQ ID NO: 27 - protein, 208 aa, Artificial Sequence
  CD80 v147 ECD
VIHVTKEVKEVATLSCGHNVSVEELAQTRIYWQKEKKMVLSMMSGDMNIWPEYKNRTIFDITNNLSIVILDLRPSDEGTYECVALKYEKDAFKREHLAEVTLSVKADFPTPSISDFETPTSNIRRIICSTSGGFPEPHLSWLENGEELNAINTTVSQDPETELYAVSSKLDFNMTTNHSFMCLIKYGHLRVNQTFNWNTTKQEHFPDN

SEQ ID NO: 28 - protein, 208 aa, Artificial Sequence
  CD80 v148 ECD
VIHVTKEVKEVATLSCGHNVSVEELAQTRIYWQKDKKMVLTMMSGDMNIWPEYKNRTIFDITNNLSIVILDLRPSDEGTYECVVLKYEKDAFKREHLAEVTLSVKADFPTPSISDFETPTSNIRRIICSTSGGFPEPHLSWLENGEELNAINTTVSQDPETELYAVSSKLDFNMTTNHSFMCLIKYGHLRVNQTFNWNTTKQEHFPDN

SEQ ID NO: 29 - protein, 208 aa, Artificial Sequence
  CD80 v149 ECD
VIHVTKEVKEVATLSCGHNVSVEELAQTRIYWQKDKKMVLTMMSGDINIWPEYKNRTIFDITNNLSIVILALRPSDEGTYECVVLKYEKDAFKREHLAEVTLSVKADFPTPSISDFETPTSNIRRIICSTSGGFPEPHLSWLENGEELNAINTTVSQDPETELYAVSSKLDFNMTTNHSFMCLIKYGHLRVNQTFNWNTTKQEHFPDN

SEQ ID NO: 30 - protein, 208 aa, Artificial Sequence
  CD80 v150 ECD
VIHVTKEVKEVATLSCGHNVSVEELAQTRIYWQKERKMVLTMMSGDMNIWPEYKNRTIFDITNNLSIVILALRPSDEATYECVVLKYEKDAFKREHLAEVTLSVKADFPTPSISDFETPTSNIRRIICSTSGGFPEPHLSWLENGEELNAINTTVSQDPETELYAVSSKLDFNMTTNHSFMCLIKYGHLRVNQTFNWNTTKQEHFPDN

SEQ ID NO: 31 - protein, 208 aa, Artificial Sequence
  CD80 v151 ECD
VIHVTKEVKEVATLSCGHNVSVEELAQTRIYWEKEKKMVLAMMSGDMNIWPEYKNRTIFDITNNLSIVILALRPSDEGTYECVVLKYEKDAFKREHLAEVTLSVKADFPTPSISDFETPTSNIRRIICSTSGGFPEPHLSWLENGEELNAINTTVSQDPETELYAVSSKLDFNMTTNHSFMCLIKYGHLRVNQTFNWNTTKQEHFPDN

SEQ ID NO: 32 - protein, 208 aa, Artificial Sequence
  CD80 v152 ECD
VIHVTKEVKEVATLSCGHNVSVEELAQTRIYWQKEKKMVLTMMSGDVHIWPEYKNRTIFDITNNLSIVILALRPSDEGTYECVVLKYEKDAFKREHLAEVTLSVKADFPTPSISDFETPTSNIRRIICSTSGGFPEPHLSWLENGEELNAINTTVSQDPETELYAVSSKLDFNMTTNHSFMCLIKYGHLRVNQTFNWNTTKQEHFPDN

SEQ ID NO: 33 - protein, 208 aa, Artificial Sequence
  CD80 v153 ECD
VIHVTKEVKEVATLSCGHNVSVEELAQTRIYWQKEKKMVLTMMSGDLNIWPEYKNRTIFDITNNLSIAILALRPSDEGTYECVVLKYEKDAFKREHLAEVTLSVKADFPTPSISDFETPTSNIRRIICSTSGGFPEPHLSWLENGEELNAINTTVSQDPETELYAVSSKLDFNMTTNHSFMCLIKYGHLRVNQTFNWNTTKQEHFPDN

SEQ ID NO: 34 - protein, 208 aa, Artificial Sequence
  CD80 v154 ECD
VIHVTKEVKEVATLSCGHNVSVEELAQTRIYWQKEKKMVLTMMPGDMNIWPEYKNRTIFDITNNLSIVILDLRPSDEGTYECVVLKYEKDAFKREHLAEVTLSVKADFPTPSISDFETPTSNIRRIICSTSGGFPEPHLSWLENGEELNAINTTVSQDPETELYAVSSKLDFNMTTNHSFMCLIKYGHLRVNQTFNWNTTKQEHFPDN

SEQ ID NO: 35 - protein, 208 aa, Artificial Sequence
  CD80 v155 ECD
VIHVTKEVKEVATLSCGHNVSVEELAHTRIYWQKEKKMVLTMISGDMNIWPEYKNRTIFDITNNLSIVILDLSPSDEGTYECVVLKYEKDAFKREHLAEVTLSVKADFPTPSISDFETPTSNIRRIICSTSGGFPEPHLSWLENGEELNAINTTVSQDPETELYAVSSKLDFNMTTNHSFMCLIKYGHLRVNQTFNWNTTKQEHFPDN

SEQ ID NO: 36 - protein, 208 aa, Artificial Sequence
  CD80 v156 ECD
  VARIANT (24)..(24): Xaa is unknown
VIHVTKEVKEVATLSCGHNVSVEXLAQTRIYWRKEKKMVLTMMSGDMNIWPEYNNRIIFDITNNLSVVILDLRPSDEGTYECVVLKYEKDAFKREHLAEVTLSVKADFPTPSISDFETPTSNIRRIICSTSGGFPEPHLSWLENGEELNAINTTVSQDPETELYAVSSKLDFNMTTNHSFMCLIKYGHLRVNQTFNWNTTKQEHFPDN

SEQ ID NO: 37 - protein, 208 aa, Artificial Sequence
  CD80 v157 ECD
VIHVTKEVKEVATLSCGHNVSVEELAQTRIYWQKDKKMVLTMMSGDMNIWPEYKNRIIFDITNNLSIVIQDLRPSDEGTYECVVLKYEKDAFKREHLAEVTLSVKADFPTPSISDFETPTSNIRRIICSTSGGFPEPHLSWLENGEELNAINTTVSQDPETELYAVSSKLDFNMTTNHSFMCLIKYGHLRVNQTFNWNTTKQEHFPDN

SEQ ID NO: 38 - protein, 208 aa, Artificial Sequence
  CD80 v158 ECD
VIHVTKEVKEVATLSCGHNVSVEELAQTRIYWQKEKKMVLTMMSGDINIWPEYKNRTIFDITNNLSIVILALRPSDEGTYECVVLKYDKDAFKREHLAEVTLSVKADFPTPSISDFETPTSNIRRIICSTSGGFPEPHLSWLENGEELNAINTTVSQDPETELYAVSSKLDFNMTTNHSFMCLIKYGHLRVNQTFNWNTTKQEHFPDN

SEQ ID NO: 39 - protein, 208 aa, Artificial Sequence
  CD80 v159 ECD
VIHVTKEVKEVATLSCGHNVSVEELAQTRIYWQKEKKMVLTIMSGDMNIWPEYKNRTIFDVTNNLSIVILDLRPSDEGTYECVVLKYEKDAFKREHLAEVTLSVKADFPTPSISDFETPTSNIRRIICSTSGGFPEPHLSWLENGEELNAINTTVSQDPETELYAVSSKLDFNMTTNHSFMCLIKYGHLRVNQTFNWNTTKQEHFPDN

SEQ ID NO: 40 - protein, 208 aa, Artificial Sequence
  CD80 v160 ECD
VIHVTKEVKEVATLSCGHNVSVEELAQTRIYWQKEKKMVLTMMSGDMNIWAEYKNRTIFDITNNLSIVILDLRPSDEGTYECVVLKYEKDAFKREHLAEVTLSVKADFPTPSISDFETPTSNIRRIICSTSGGFPEPHLSWLENGEELNAINTTVSQDPETELYAVSSKLDFNMTTNHSFMCLIKYGHLRVNQTFNWNTTKQEHFPDN

SEQ ID NO: 41 - protein, 208 aa, Artificial Sequence
  CD80 v161 ECD
VIHVTKEVKEVATLSCGYNVSVEELAQTRIYWQKEKKMVLTMMSGDINIWPEYKNRIIFDITNNLSIVILGLRPSDEGTYECVVLKYEKDAFKREHLAEVTLSVKADFPTPSISDFETPTSNIRRIICSTSGGFPEPHLSWLENGEELNAINTTVSQDPETELYAVSSKLDFNMTTNHSFMCLIKYGHLRVNQTFNWNTTKQEHFPDN

SEQ ID NO: 42 - protein, 208 aa, Artificial Sequence
  CD80 v162 ECD
VIHVTKEVKEVATLSCGHNISVEELAQTRIYWQKEKKMVLTMMSGDVNIWPEYKNRIIFDITNNLSIVILALRPSDEGTYECVILKYEKDAFKREHLAEVTLSVKADFPTPSISDFETPTSNIRRIICSTSGGFPEPHLSWLENGEELNAINTTVSQDPETELYAVSSKLDFNMTTNHSFMCLIKYGHLRVNQTFNWNTTKQEHFPDN

SEQ ID NO: 43 - protein, 208 aa, Artificial Sequence
  CD80 v163 ECD
VIHVTKEVKEVATLSCGHNISVEELAQTRIYWQKEKKMVLTMMSGDVNIWPEYKNRTIFDITNNLSIVILDLRPSDEGTYECVVLKYEKDAFKREHLAEVTLSVKADFPTPSISDFETPTSNIRRIICSTSGGFPEPHLSWLENGEELNAINTTVSQDPETELYAVSSKLDFNMTTNHSFMCLIKYGHLRVNQTFNWNTTKQEHFPDN

SEQ ID NO: 44 - protein, 208 aa, Artificial Sequence
  CD80 v164 ECD
VIHVTKEVKEVATLSCGHNVSVEELAQTRIYWQKEKKMVLTMMSGDMNIWPEYKNRTIFDITNNLSIVILDVRPSDEGTYECVVLKYEKDAFKRKHLAEVTLSVKADFPTPSISDFETPTSNIRRIICSTSGGFPEPHLSWLENGEELNAINTTVSQDPETELYAVSSKLDFNMTTNHSFMCLIKYGHLRVNQTFNWNTTKQEHFPDN

SEQ ID NO: 45 - protein, 208 aa, Artificial Sequence
  CD80 v165 ECD
VIHVTKEVKEVATLSCGHNVSLEELAQTRIYWQKGKKMVLTMMSGDMNIWPEYKNRTIFDITNNLSIVILDPRPSDEGTYECVVLKYEKDAFKREHLAEVTLSVKADFPTPSISDFETPTSNIRRIICSTSGGFPEPHLSWLENGEELNAINTTVSQDPETELYAVSSKLDFNMTTNHSFMCLIKYGHLRVNQTFNWNTTKQEHFPDN

SEQ ID NO: 46 - protein, 208 aa, Artificial Sequence; identical to SEQ ID NO: 28
  CD80 v166 ECD

SEQ ID NO: 47 - protein, 208 aa, Artificial Sequence
  CD80 v167 ECD
VIHVTKEVKEVATLSCGHNVSVEELAQTRIYWQKDKKMVLTMMSGDMNIWPEYKNRTIFDITNNLSLVILDLRPSDEGTYECVVLKYEKDAFKREHLAEVTLSVKADFPTPSISDFETPTSNIRRIICSTSGGFPEPHLSWLENGEELNAINTTVSQDPETELYAVSSKLDFNMTTNHSFMCLIKYGHLRVNQTFNWNTTKQEHFPDN

SEQ ID NO: 48 - protein, 208 aa, Artificial Sequence
  CD80 v168 ECD
VIHVTKEVKEVATLSCGHNVSVEELAHTRIYWQKGKKMVLTMMSGDMNIWPEYKNRTIFDITNNLSIVILDPRPSDEGIYECVVLKYEKDAFKREHLAEVTLSVKADFPTPSISDFETPTSNIRRIICSTSGGFPEPHLSWLENGEELNAINTTVSQDPETELYAVSSKLDFNMTTNHSFMCLIKYGHLRVNQTFNWNTTKQEHFPDN

SEQ ID NO: 49 - protein, 208 aa, Artificial Sequence
  CD80 v169 ECD
VIHVTKEVKEVARLSCGHNVSVEELAQTRIYWQKEKKMVLTVMSGDINIWPEYKNRTIFDITNNLSIVILDLRPSDEGTYECVVLKYEKDAFKREHLAEVTLSVKADFPTPSISDFETPTSNIRRIICSTSGGFPEPHLSWLENGEELNAINTTVSQDPETELYAVSSKLDFNMTTNHSFMCLIKYGHLRVNQTFNWNTTKQEHFPDN

SEQ ID NO: 50 - protein, 208 aa, Artificial Sequence
  CD80 v170 ECD
VIHVTKEVKEVATLSCGHNVSVEELAQTRIYWQKDKKMVLTMMSGDMNIWPEYKNRTIFDITNNLSIVILALRPSDEGTYECVVLKYEKDAFKREHLAEVTLSVKADFPTPSISDFETPTSNIRRIICSTSGGFPEPHLSWLENGEELNAINTTVSQDPETELYAVSSKLDFNMTTNHSFMCLIKYGHLRVNQTFNWNTTKQEHFPDN

SEQ ID NO: 51 - protein, 208 aa, Artificial Sequence
  CD80 v171 ECD
VIHVTKEVKEVATLSCGHNVSVEELAQTRIYWQKDKKMVLTMMSGDINIWPEYKNRTIFDITNNLSIVIMALRPSDEGTYECVVLKYEKDAFKREHLAEVTLSVKADFPTPSISDFETPTSNIRRIICSTSGGFPEPHLSWLENGEELNAINTTVSQDPETELYAVSSKLDFNMTTNHSFMCLIKYGHLRVNQTFNWNTTKQEHFPDN

SEQ ID NO: 52 - protein, 208 aa, Artificial Sequence
  CD80 v172 ECD
VIHVTKEVKEVATLSCGHNVSVEELAQTRIYWQKDKKMVLTMMSGDMNIWPEYKNRTIFDITNNLSIVILDVRPSDEGTYECVVLKYEKDAFKREHLAEVTLSVKADFPTPSISDFETPTSNIRRIICSTSGGFPEPHLSWLENGEELNAINTTVSQDPETELYAVSSKLDFNMTTNHSFMCLIKYGHLRVNQTFNWNTTKQEHFPDN

SEQ ID NO: 53 - protein, 208 aa, Artificial Sequence
  CD80 v173 ECD
VIHVTKEVKEVATLSCGHNVSVEELAQTRIYWQKDKKMVLTMLSGDMNIWPEYKNRTIFDITNNLSIVIMALRPSDEGTYECVVLKYEKDAFKREHLAEVTLSVKADFPTPSISDFETPTSNIRRIICSTSGGFPEPHLSWLENGEELNAINTTVSQDPETELYAVSSKLDFNMTTNHSFMCLIKYGHLRVNQTFNWNTTKQEHFPDN

SEQ ID NO: 54 - protein, 208 aa, Artificial Sequence
  CD80 v174 ECD
VIHVTKEVKEVATLSCGHNVSVEELPQTRIYWQKDKKMVLTMISGDMNIWPEYKNRTIFDITNNLSIVILALRPSDEGTYECVVQKYDKDAFKREHLAEVTLSVKADFPTPSISDFETPTSNIRRIICSTSGGFPEPHLSWLENGEELNAINTTVSQDPETELYAVSSKLDFNMTTNHSFMCLIKYGHLRVNQTFNWNTTKQEHFPDN

SEQ ID NO: 55 - protein, 208 aa, Artificial Sequence
  CD80 v175 ECD
VIHVTKEVKEVATLSCGHNVSVEELAQTRIYWQKDKKMVLTMMSGVMNIWPEYKNRTIFDITNNLSIVILALRPSDEGTYECVVQKYEKDAFKREHLAEVTLSVKADFPTPSISDFETPTSNIRRIICSTSGGFPEPHLSWLENGEELNAINTTVSQDPETELYAVSSKLDFNMTTNHSFMCLIKYGHLRVNQTFNWNTTKQEHFPDN

SEQ ID NO: 56 - protein, 208 aa, Artificial Sequence
  CD80 v176 ECD
VIHVTKEVKEVATLSCGHNVSVEELALTRIYWQKDKKMVLTMMSGDINIWPEYKNRIIFDITNNLSIVIQALRPSDEGTYECVVLKYDKDAFKREHLAEVTLSVKADFPTPSISDFETPTSNIRRIICSTSGGFPEPHLSWLENGEELNAINTTVSQDPETELYAVSSKLDFNMTTNHSFMCLIKYGHLRVNQTFNWNTTKQEHFPDN

SEQ ID NO: 57 - protein, 208 aa, Artificial Sequence
  CD80 v177 ECD
VIHVTKEVKEVATLSCGHNVSVEELAQTRIYWQKEKKMVLTMMSGDVNIWPEYKNRTIFDITNNLSIVFLDLRPSDEGTYECIVLKYEKDAFKREHLAEVTLSVKADFPTPSISDFETPTSNIRRIICSTSGGFPEPHLSWLENGEELNAINTTVSQDPETELYAVSSKLDFNMTTNHSFMCLIKYGHLRVNQTFNWNTTKQEHFPDN

SEQ ID NO: 58 - protein, 208 aa, Artificial Sequence
  CD80 v178 ECD
VIHVTKEVKEVATLSCGHNVSVEELAQTRIYWQKDKKMVLTMMSGDMNIWPEYKNRAIFDITNNLSIVILDLRPSDEGTYECVVQKYEKDAFKREHLAEVTLSVKADFPTPSISDFETPTSNIRRIICSTSGGFPEPHLSWLENGEELNAINTTVSQDPETELYAVSSKLDFNMTTNHSFMCLIKYGHLRVNQTFNWNTTKQEHFPDN

SEQ ID NO: 59 - protein, 208 aa, Artificial Sequence
  CD80 v179 ECD
VIHVTKEVKEVATLSCGYNVSVEELTQTRIYWQKDKKMVLTMMSGDMNIWPEYKNRTIFDITNNLSIVILDLRPSDEGTYECVVQKYEKDAFKREHLAEVTLSVKADFPTPSISDFETPTSNIRRIICSTSGGFPEPHLSWLENGEELNAINTTVSQDPETELYAVSSKLDFNMTTNHSFMCLIKYGHLRVNQTFNWNTTKQEHFPDN

SEQ ID NO: 60 - protein, 208 aa, Artificial Sequence
  CD80 v180 ECD
VIHVTKEVKEVATLSCGHNVSVEELAQTRIYWQKDKKMVLTMMSGDLNIWPEYKNRTIFDITNNLSIVILALRPSDEGTYECVVLKYEKDAFKREHLAEVTLSVKADFPTPSISDFETPTSNIRRIICSTSGGFPEPHLSWLENGEELNAINTTVSQDPETELYAVSSKLDFNMTTNHSFMCLIKYGHLRVNQTFNWNTTKQEHFPDN

SEQ ID NO: 61 - protein, 208 aa, Artificial Sequence
  CD80 v181 ECD
VIHVTKEVKEVATLSCGHNVSVDELAQTRIYWQKEKKMVLTVISGDMNIWPEYKNRTVFDITNNLSIVIRALRPSDEGTYECVVLKYEKDAFKREHLAEVTLSVKADFPTPSISDFETPTSNIRRIICSTSGGFPEPHLSWLENGEELNAINTTVSQDPETELYAVSSKLDFNMTTNHSFMCLIKYGHLRVNQTFNWNTTKQEHFPDN

SEQ ID NO: 62 - protein, 208 aa, Artificial Sequence
  CD80 v182 ECD
VIHVTKEVKEVATLSCGHNVSVEELAQTRIYWQKEKKMVLTMMSGDMNIWPEYKNRTIFDITNNLSIMIMDLRPSDEGTYECVVLKYEKDAFKRKHLAEVTLSVKADFPTPSISDFETPTSNIRRIICSTSGGFPEPHLSWLENGEELNAINTTVSQDPETELYAVSSKLDFNMTTNHSFMCLIKYGHLRVNQTFNWNTTKQEHFPDN

SEQ ID NO: 63 - protein, 208 aa, Artificial Sequence
  CD80 v183 ECD
VIHVTKEVKEVATLSCGHNVSVEELAQTRIYWQKEKKMVLTMMSGDMNIWPEYKIRIIFDITNNLSIVFLALRPSDEGTYECVVLKYEKDAFKREHLAEVTLSVKADFPTPSISDFETPTSNIRRIICSTSGGFPEPHLSWLENGEELNAINTTVSQDPETELYAVSSKLDFNMTTNHSFMCLIKYGHLRVNQTFNWNTTKQEHFPDN

SEQ ID NO: 64 - protein, 208 aa, Artificial Sequence
  CD80 v184 ECD
VIHVTKEVKEVATLSCGHNVSVEELAQTRIYWQKDKKMVLTMISGDMNIWPEYKNRTIFDITNNLSIVILDLRPSDEGTYECVVLKYEKDAFKREHLAEVTLSVKADFPTPSISDFETPTSNIRRIICSTSGGFPEPHLSWLENGEELNAINTTVSQDPETELYAVSSKLDFNMTTNHSFMCLIKYGHLRVNQTFNWNTTKQEHFPDN

SEQ ID NO: 65 - protein, 208 aa, Artificial Sequence
  CD80 v185 ECD
VIHVTKEVKEVATLSCGHNVSVEELAQTRIYWQKEKKMVLSMMSGDMNIWPEYKNRIIFDITNNLSIVIRALRPSDEGTYECVVLKYEKDAFKREHLAEVTLSVKADFPTPSISDFETPTSNIRRIICSTSGGFPEPHLSWLENGEELNAINTTVSQDPETELYAVSSKLDFNMTTNHSFMCLIKYGHLRVNQTFNWNTTKQEHFPDN

SEQ ID NO: 66 - protein, 208 aa, Artificial Sequence
  CD80 v186 ECD
VIHVTKEVKEVATLSCGYNVSVEELAQTRIYWQKEKKMVLTMMSGDMNIWPEYKNRTIFDITNNLSIVILDPRPSDEGTYECVVLKYVKDAFKREHLAEVTLSVKADFPTPSISDFETPTSNIRRIICSTSGGFPEPHLSWLENGEELNAINTTVSQDPETELYAVSSKLDFNMTTNHSFMCLIKYGHLRVNQTFNWNTTKQEHFPDN

SEQ ID NO: 67 - protein, 208 aa, Artificial Sequence
  CD80 v187 ECD
VIHVTKEVKEVATLSCGHNISVEELAQTRIYWQKEKKMVLTMMSGDMNIWPEYKNRTIFDITNNLSIVILDLRPSDEGTYECVVLKYEKDAFKREHLAEVTLSVKADFPTPSISDFETPTSNIRRIICSTSGGFPEPHLSWLENGEELNAINTTVSQDPETELYAVSSKLDFNMTTNHSFMCLIKYGHLRVNQTFNWNTTKQEHFPDN

SEQ ID NO: 68 - protein, 208 aa, Artificial Sequence
  CD80 v188 ECD
VIHVTKEVKEVATLSCGHNVSVGELSQTRIYWQKDKKMVLTMMSGDMNIWPEYKNRTIFDINNNLSIVILDVRPSDEGTYECVVMKYEKDAFKREHLAEVTLSVKADFPTPSISDFETPTSNIRRIICSTSGGFPEPHLSWLENGEELNAINTTVSQDPETELYAVSSKLDFNMTTNHSFMCLIKYGHLRVNQTFNWNTTKQEHFPDN

SEQ ID NO: 69 - protein, 208 aa, Artificial Sequence
  CD80 v189 ECD
VIHVTKEVKEVTTLSCGHNVSVEDLAQTRIYWQKDKKMVLTMMSGVMNIWPEYKNRTIFDVTNNLSIVILAPRPSDEGTYECVVLKYEKDAFKRVHLAEVTLSVKADFPTPSISDFETPTSNIRRIICSTSGGFPEPHLSWLENGEELNAINTTVSQDPETELYAVSSKLDFNMTTNHSFMCLIKYGHLRVNQTFNWNTTKQEHFPDN

SEQ ID NO: 70 - protein, 208 aa, Artificial Sequence
  CD80 v190 ECD
VIHVTKEVKEVATLSCGHNVSLEELAQTRIYWQKDKKMVLTMLSGDMNIWPEYKNRTIFDITNNLSIVILGLRPSHEGTYECVVLKYEKDAFKREHLAEVTLSVKADFPTPSISDFETPTSNIRRIICSTSGGFPEPHLSWLENGEELNAINTTVSQDPETELYAVSSKLDFNMTTNHSFMCLIKYGHLRVNQTFNWNTTKQEHFPDN

SEQ ID NO: 71 - protein, 208 aa, Artificial Sequence
  CD80 v191 ECD
VIHVTKEVKEVATLSCGHNVSVEELAQTRIYWQKGKKMVLTMMSGDMNIWPEYENRTIFDITNNLSIVILDPRPSDEGTYECVVLKYEKDAFKREHLAEVTLSVKADFPTPSISDFETPTSNIRRIICSTSGGFPEPHLSWLENGEELNAINTTVSQDPETELYAVSSKLDFNMTTNHSFMCLIKYGHLRVNQTFNWNTTKQEHFPDN

SEQ ID NO: 72 - protein, 208 aa, Artificial Sequence
  CD80 v192 ECD
VIHVTKEVKEVATLSCGHNVSVEELAQTRIYWQKEKKMVLTMMSGDMNIWPEYKNRTIFDITNNLSIVIQDLRPSDEGTYECVVLKYEKDAFKREHLAEVTLSVKADFPTPSISDFETPTSNIRRIICSTSGGFPEPHLSWLENGEELNAINTTVSQDPETELYAVSSKLDFNMTTNHSFMCLIKYGHLRVNQTFNWNTTKQEHFPDN

SEQ ID NO: 73 - protein, 208 aa, Artificial Sequence
  CD80 v193 ECD
VIHVTKEVKEVATLSCGHNVSVEELEQTRIYWQKDKKMVLTMMSGDLNIWPEYKNRTIFDITNNLSIVILALRPSDEGTYECVVQKYEKDAFKREHLAEVTLSVKADFPTPSISDFETPTSNIRRIICSTSGGFPEPHLSWLENGEELNAINTTVSQDPETELYAVSSKLDFNMTTNHSFMCLIKYGHLRVNQTFNWNTTKQEHFPDN

SEQ ID NO: 74 - protein, 208 aa, Artificial Sequence
  CD80 v194 ECD
VIHVTKEVKEVATLSCGHNVSVEELAQTRIYWQKEKKMVLTMMSGEMNIWPEYKNRTIFDITNNLSIVILDLRPSDEGTYECVVLKYEKDAFKREHLAEVTLSVKADFPTPSISDFETPTSNIRRIICSTSGGFPEPHLSWLENGEELNAINTTVSQDPETELYAVSSKLDFNMTTNHSFMCLIKYGHLRVNQTFNWNTTKQEHFPDN

SEQ ID NO: 75 - protein, 208 aa, Artificial Sequence
  CD80 v195 ECD
VIHVTKEVKEVATLSCGHNVSVEELAQTRIHWQKDKKMVLSMMSGDMNIWPEYKNRTIFDITNNLSILILALRPSDEGTYECVVLKYEKDAFRWEHLAEVTLSVKADFPTPSISDFETPTSNIRRIICSTSGGFPEPHLSWLENGEELNAINTTVSQDPETELYAVSSKLDFNMTTNHSFMCLIKYGHLRVNQTFNWNTTKQEHFPDN

SEQ ID NO: 76 - protein, 101 aa, Artificial Sequence
  CD80 WT IgV
VIHVTKEVKEVATLSCGHNVSVEELAQTRIYWQKEKKMVLTMMSGDMNIWPEYKNRTIFDITNNLSIVILALRPSDEGTYECVVLKYEKDAFKREHLAEVT

SEQ ID NO: 77 - protein, 101 aa, Artificial Sequence
  CD80 v122 IgV
VIHVTKEVKEVATLSCGHNVSVEELAQTRIYWQKEKKMVLTMMSGDMNIWPEYKNRTIFDITNNLSIVIPALRPSDEGTYECVVLKYEKDAFKREHLAEVT

SEQ ID NO: 78 - protein, 101 aa, Artificial Sequence
  CD80 v123 IgV
VIHVTKEVKEVATLSCGHNVSVEELAQTRFYWQKEKKMVLTMMSGDMNIWPEYKNRTIFDITNNLSIVIPALRPSDEGTYECVVLKYEKDAFKREHLAEVT

SEQ ID NO: 79 - protein, 101 aa, Artificial Sequence
  CD80 v124 IgV
VIHVTKEVKEVATLSCGHNVSVEELAHTRIYWQKEKKMVLSMMSGDMNIWPEYKNRTIFDITNNLSIVILDLRPSDEGTYECVVLKYEKDAFKREHLAEVT

SEQ ID NO: 80 - protein, 101 aa, Artificial Sequence
  CD80 v125 IgV
VIHVTKEVKEVATLSCGHNVSVEELAQTRTYWQKEKKMVLTMMSGDMNIWPEYKNRTIFDITNNLSIVIRALRPSDEGTYECVVLKYEKDAFKREHLAEVT

SEQ ID NO: 81 - protein, 101 aa, Artificial Sequence
  CD80 v126 IgV
VIHVTKEVKEVARLSRGHNVSVEELAQTRIYWQKEKKMVLTMMSGDMNIWPEYKNRTIFDITNNLSIVIQDLRPSDEGTYECVVLKYEKDAFKREHLAEVT

SEQ ID NO: 82 - protein, 101 aa, Artificial Sequence
  CD80 v127 IgV
VIHVTKEVKEVATLSCGHNVSVEELAQTRIYWQKEKKMVLTMMSGDMNIWPEYKNRIIFDITNNLSIVILALRPSDEGTYECVVLKYEKDAFKREHLAEVT

SEQ ID NO: 83 - protein, 101 aa, Artificial Sequence
  CD80 v128 IgV
VIHVTKEVKEVATLSCGHNVSVEELAQTRIYWQKEKKMVLTMISGDMNIWPEYKNRTIFDITNNLSIVILALRPSDEGTYERVVLKYEKDAFKREHLAEVT

SEQ ID NO: 84 - protein, 101 aa, Artificial Sequence
  CD80 v130 IgV
VIHVTKEVKEVATLSCGHNVSLEELAQTRIYWQKEKKVVLTMMSGDTNIWPEYKNRTIFDITNNLSIVILDLRPSDEGTYECVVMKYEKDAFKREHLAEVT

SEQ ID NO: 85 - protein, 101 aa, Artificial Sequence
  CD80 v131 IgV
VIHVTKEVKEVATLSCGHNVSVEELAQTRVYWQKEKKMVLTMMSGDMNIWPEYKNRIIFDITNNLSIVIPDLRPSDEGTYECVVLKYEKDTFKREHLAEVT

SEQ ID NO: 86 - protein, 101 aa, Artificial Sequence
  CD80 v132 IgV
VIHVTKEVKEVATLSCGHNVSIEELAQTRIYWQKEKKMVLTMMSGDMNIWPEYKNRTIFDITNNLSIVIMDLRPSDEGTYECVVLKYEKDAFKREHLAEVT

SEQ ID NO: 87 - protein, 101 aa, Artificial Sequence
  CD80 v133 IgV
VIHVTKEVKEVATLSCGHNVSVEELAQTRIYWQKEKKMVLTMMSGDMNIWPEYKDRTIFDITNNLSIVIPALRPSDGGTYECVVLKYEKDAFKREHLAEVT

SEQ ID NO: 88 - protein, 101 aa, Artificial Sequence
  CD80 v134 IgV
VIHVTKEVKEVATLSCGHNVSVEELAQTRIYWQKEKKMVLTMMSGDMNIWPEYKNRAIFDITNNLSIVTLALRPSDEGTYECVVLKYEKDAFKREHLAEVT

SEQ ID NO: 89 - protein, 101 aa, Artificial Sequence
  CD80 v135 IgV
VIHVTKEVKEVATLSCGHNVSVEELAQTRIYWQKEKKMVLTMMSGDMNIWPEYKDRTIFDITNNLSIVILALRPSDEGTYECVVLMYEKDAFKREHLAEVT

SEQ ID NO: 90 - protein, 101 aa, Artificial Sequence
  CD80 v136 IgV
VIHVTKEVKEVATLSCGHNVSVEELAQTRIYWQKEKKMVLTMMSGDMNIWPEYKNRTIFDITNNLSIVILAPRPSDEGIYECVVLKYEKDAFKREHLAEVT

SEQ ID NO: 91 - protein, 101 aa, Artificial Sequence
  CD80 v137 IgV
VIHVTKEVKEVATLSCGHNVSVEELAQTRIYWQKEKKMVLTMMSGDMNIWPEYKNRTIFDITNNLSIVIPALRPSDEGTYECVVLKYEKDASKREHLAEVT

SEQ ID NO: 92 - protein, 101 aa, Artificial Sequence
  CD80 v138 IgV
VIHVTKEVKEVATLSCGHNVSVEELAQTRIYWQKEKKMVLTMMSGDMNIWPEYKNRTIFDITNNLSIVILALRPSDEGPYECVVLKYEKDAFKREHLAEVT

SEQ ID NO: 93 - protein, 101 aa, Artificial Sequence
  CD80 v139 IgV
VIHVTKEVKEVATLSCGHNVSVEELAQTRIYWQKDKKMVLTMMSGDINIWPEYKNRTIFDITNNPSIVILALRPSDEGTYECVVLKYEKNAFKREHLAEVT

SEQ ID NO: 94 - protein, 101 aa, Artificial Sequence
  CD80 v140 IgV
VIHVTKEVKEVATLSCGHNVSVEESAQTRIYWQKDKKMVLTMMSGDINIWPEYKNRTIFDITNNLSIVILALRPSDEGTYECVVLKYEKNAFKREHLAEVT

SEQ ID NO: 95 - protein, 101 aa, Artificial Sequence
  CD80 v141 IgV
VIHVTKEVKEVATLSCGHNVSVEELAQTRIYWQKEKKMVLTMMPGDMNIWPEYKNRTIFDITNNLSTVILALRSSDEGTYGCVVLKYEKDAFKRDHLAEVT

SEQ ID NO: 96 - protein, 101 aa, Artificial Sequence
  CD80 v142 IgV
VIHVTKEVKEVATLSCGHNVSVEELAQTRIYWQKEKKMVLTMMSGDMNIWPEYKNRTIFDITNNLSIVILDLRPSDEGTYECVVLKYEKDAFKREHLAEVT

SEQ ID NO: 97 - protein, 101 aa, Artificial Sequence
  CD80 v143 IgV
VIHVTKEVKEVAALSCGHNVSVEELAQTRIYWQKEKKMVLTMMSGDMNIWPEYKNRTIFDNTNNLSIVILDLRPSDEGTYECVVLKYEKDAFKREHLAEVT

SEQ ID NO: 98 - protein, 101 aa, Artificial Sequence
  CD80 v144 IgV
VIHVTKEVKEVATLSCGHNVSVEELAQTRIYWQKEKKMVLTMMSGDMNIWPEYKNRTIFDITNNLSIVILALRPSDEGTYKCVVLKYEKDSFKREHLAEVT

SEQ ID NO: 99 - protein, 101 aa, Artificial Sequence
  CD80 v145 IgV
VIHVTKEVKEVVTLSCGHNVSVEELAQTRIYWQKEKKMVLTMMSGDVNIWPEYKNRTIFDITNNLSIVIMALRPSDEGTYECVVLKYEKDAFKREHLAEVT

SEQ ID NO: 100 - protein, 101 aa, Artificial Sequence
  CD80 v146 IgV
VIHVTKEVKEVATLSCGHNVSVEELAQTRIYWQEEKKMVLAMMSGDMNIWPEYKNRTIFDITNNLSIVILAVRPSDEGTYECVVLKYEKDAFKREHLAEVT

SEQ ID NO: 101 - protein, 101 aa, Artificial Sequence
  CD80 v147 IgV
VIHVTKEVKEVATLSCGHNVSVEELAQTRIYWQKEKKMVLSMMSGDMNIWPEYKNRTIFDITNNLSIVILDLRPSDEGTYECVALKYEKDAFKREHLAEVT

SEQ ID NO: 102 - protein, 101 aa, Artificial Sequence
  CD80 v148 IgV
VIHVTKEVKEVATLSCGHNVSVEELAQTRIYWQKDKKMVLTMMSGDMNIWPEYKNRTIFDITNNLSIVILDLRPSDEGTYECVVLKYEKDAFKREHLAEVT

SEQ ID NO: 103 - protein, 101 aa, Artificial Sequence
  CD80 v149 IgV
VIHVTKEVKEVATLSCGHNVSVEELAQTRIYWQKDKKMVLTMMSGDINIWPEYKNRTIFDITNNLSIVILALRPSDEGTYECVVLKYEKDAFKREHLAEVT

SEQ ID NO: 104 - protein, 101 aa, Artificial Sequence
  CD80 v150 IgV
VIHVTKEVKEVATLSCGHNVSVEELAQTRIYWQKERKMVLTMMSGDMNIWPEYKNRTIFDITNNLSIVILALRPSDEATYECVVLKYEKDAFKREHLAEVT

SEQ ID NO: 105 - protein, 101 aa, Artificial Sequence
  CD80 v151 IgV
VIHVTKEVKEVATLSCGHNVSVEELAQTRIYWEKEKKMVLAMMSGDMNIWPEYKNRTIFDITNNLSIVILALRPSDEGTYECVVLKYEKDAFKREHLAEVT

SEQ ID NO: 106 - protein, 101 aa, Artificial Sequence
  CD80 v152 IgV
VIHVTKEVKEVATLSCGHNVSVEELAQTRIYWQKEKKMVLTMMSGDVHIWPEYKNRTIFDITNNLSIVILALRPSDEGTYECVVLKYEKDAFKREHLAEVT

SEQ ID NO: 107 - protein, 101 aa, Artificial Sequence
  CD80 v153 IgV
VIHVTKEVKEVATLSCGHNVSVEELAQTRIYWQKEKKMVLTMMSGDLNIWPEYKNRTIFDITNNLSIAILALRPSDEGTYECVVLKYEKDAFKREHLAEVT

SEQ ID NO: 108 - protein, 101 aa, Artificial Sequence
  CD80 v154 IgV
VIHVTKEVKEVATLSCGHNVSVEELAQTRIYWQKEKKMVLTMMPGDMNIWPEYKNRTIFDITNNLSIVILDLRPSDEGTYECVVLKYEKDAFKREHLAEVT

SEQ ID NO: 109 - protein, 101 aa, Artificial Sequence
  CD80 v155 IgV
VIHVTKEVKEVATLSCGHNVSVEELAHTRIYWQKEKKMVLTMISGDMNIWPEYKNRTIFDITNNLSIVILDLSPSDEGTYECVVLKYEKDAFKREHLAEVT

SEQ ID NO: 110 - protein, 101 aa, Artificial Sequence
  CD80 v156 IgV
  VARIANT (24)..(24): Xaa is unknown
VIHVTKEVKEVATLSCGHNVSVEXLAQTRIYWRKEKKMVLTMMSGDMNIWPEYNNRIIFDITNNLSVVILDLRPSDEGTYECVVLKYEKDAFKREHLAEVT

SEQ ID NO: 111 - protein, 101 aa, Artificial Sequence
  CD80 v157 IgV
VIHVTKEVKEVATLSCGHNVSVEELAQTRIYWQKDKKMVLTMMSGDMNIWPEYKNRIIFDITNNLSIVIQDLRPSDEGTYECVVLKYEKDAFKREHLAEVT

SEQ ID NO: 112 - protein, 101 aa, Artificial Sequence
  CD80 v158 IgV
VIHVTKEVKEVATLSCGHNVSVEELAQTRIYWQKEKKMVLTMMSGDINIWPEYKNRTIFDITNNLSIVILALRPSDEGTYECVVLKYDKDAFKREHLAEVT

SEQ ID NO: 113 - protein, 101 aa, Artificial Sequence
  CD80 v159 IgV
VIHVTKEVKEVATLSCGHNVSVEELAQTRIYWQKEKKMVLTIMSGDMNIWPEYKNRTIFDVTNNLSIVILDLRPSDEGTYECVVLKYEKDAFKREHLAEVT

SEQ ID NO: 114 - protein, 101 aa, Artificial Sequence
  CD80 v160 IgV
VIHVTKEVKEVATLSCGHNVSVEELAQTRIYWQKEKKMVLTMMSGDMNIWAEYKNRTIFDITNNLSIVILDLRPSDEGTYECVVLKYEKDAFKREHLAEVT

SEQ ID NO: 115 - protein, 101 aa, Artificial Sequence
  CD80 v161 IgV
VIHVTKEVKEVATLSCGYNVSVEELAQTRIYWQKEKKMVLTMMSGDINIWPEYKNRIIFDITNNLSIVILGLRPSDEGTYECVVLKYEKDAFKREHLAEVT

SEQ ID NO: 116 - protein, 101 aa, Artificial Sequence
  CD80 v162 IgV
VIHVTKEVKEVATLSCGHNISVEELAQTRIYWQKEKKMVLTMMSGDVNIWPEYKNRIIFDITNNLSIVILALRPSDEGTYECVILKYEKDAFKREHLAEVT

SEQ ID NO: 117 - protein, 101 aa, Artificial Sequence
  CD80 v163 IgV
VIHVTKEVKEVATLSCGHNISVEELAQTRIYWQKEKKMVLTMMSGDVNIWPEYKNRTIFDITNNLSIVILDLRPSDEGTYECVVLKYEKDAFKREHLAEVT

SEQ ID NO: 118 - protein, 101 aa, Artificial Sequence
  CD80 v164 IgV
VIHVTKEVKEVATLSCGHNVSVEELAQTRIYWQKEKKMVLTMMSGDMNIWPEYKNRTIFDITNNLSIVILDVRPSDEGTYECVVLKYEKDAFKRKHLAEVT

SEQ ID NO: 119 - protein, 101 aa, Artificial Sequence
  CD80 v165 IgV
VIHVTKEVKEVATLSCGHNVSLEELAQTRIYWQKGKKMVLTMMSGDMNIWPEYKNRTIFDITNNLSIVILDPRPSDEGTYECVVLKYEKDAFKREHLAEVT

SEQ ID NO: 120 - protein, 101 aa, Artificial Sequence; identical to SEQ ID NO: 102
  CD80 v166 IgV

SEQ ID NO: 121 - protein, 101 aa, Artificial Sequence
  CD80 v167 IgV
VIHVTKEVKEVATLSCGHNVSVEELAQTRIYWQKDKKMVLTMMSGDMNIWPEYKNRTIFDITNNLSLVILDLRPSDEGTYECVVLKYEKDAFKREHLAEVT

SEQ ID NO: 122 - protein, 101 aa, Artificial Sequence
  CD80 v168 IgV
VIHVTKEVKEVATLSCGHNVSVEELAHTRIYWQKGKKMVLTMMSGDMNIWPEYKNRTIFDITNNLSIVILDPRPSDEGIYECVVLKYEKDAFKREHLAEVT

SEQ ID NO: 123 - protein, 101 aa, Artificial Sequence
  CD80 v169 IgV
VIHVTKEVKEVARLSCGHNVSVEELAQTRIYWQKEKKMVLTVMSGDINIWPEYKNRTIFDITNNLSIVILDLRPSDEGTYECVVLKYEKDAFKREHLAEVT

SEQ ID NO: 124 - protein, 101 aa, Artificial Sequence
  CD80 v170 IgV
VIHVTKEVKEVATLSCGHNVSVEELAQTRIYWQKDKKMVLTMMSGDMNIWPEYKNRTIFDITNNLSIVILALRPSDEGTYECVVLKYEKDAFKREHLAEVT

SEQ ID NO: 125 - protein, 101 aa, Artificial Sequence
  CD80 v171 IgV
VIHVTKEVKEVATLSCGHNVSVEELAQTRIYWQKDKKMVLTMMSGDINIWPEYKNRTIFDITNNLSIVIMALRPSDEGTYECVVLKYEKDAFKREHLAEVT

SEQ ID NO: 126 - protein, 101 aa, Artificial Sequence
  CD80 v172 IgV
VIHVTKEVKEVATLSCGHNVSVEELAQTRIYWQKDKKMVLTMMSGDMNIWPEYKNRTIFDITNNLSIVILDVRPSDEGTYECVVLKYEKDAFKREHLAEVT

SEQ ID NO: 127 - protein, 101 aa, Artificial Sequence
  CD80 v173 IgV
VIHVTKEVKEVATLSCGHNVSVEELAQTRIYWQKDKKMVLTMLSGDMNIWPEYKNRTIFDITNNLSIVIMALRPSDEGTYECVVLKYEKDAFKREHLAEVT

SEQ ID NO: 128 - protein, 101 aa, Artificial Sequence
  CD80 v174 IgV
VIHVTKEVKEVATLSCGHNVSVEELPQTRIYWQKDKKMVLTMISGDMNIWPEYKNRTIFDITNNLSIVILALRPSDEGTYECVVQKYDKDAFKREHLAEVT

SEQ ID NO: 129 - protein, 101 aa, Artificial Sequence
  CD80 v175 IgV
VIHVTKEVKEVATLSCGHNVSVEELAQTRIYWQKDKKMVLTMMSGVMNIWPEYKNRTIFDITNNLSIVILALRPSDEGTYECVVQKYEKDAFKREHLAEVT

SEQ ID NO: 130 - protein, 101 aa, Artificial Sequence
  CD80 v176 IgV
VIHVTKEVKEVATLSCGHNVSVEELALTRIYWQKDKKMVLTMMSGDINIWPEYKNRIIFDITNNLSIVIQALRPSDEGTYECVVLKYDKDAFKREHLAEVT

SEQ ID NO: 131 - protein, 101 aa, Artificial Sequence
  CD80 v177 IgV
VIHVTKEVKEVATLSCGHNVSVEELAQTRIYWQKEKKMVLTMMSGDVNIWPEYKNRTIFDITNNLSIVFLDLRPSDEGTYECIVLKYEKDAFKREHLAEVT

SEQ ID NO: 132 - protein, 101 aa, Artificial Sequence
  CD80 v178 IgV
VIHVTKEVKEVATLSCGHNVSVEELAQTRIYWQKDKKMVLTMMSGDMNIWPEYKNRAIFDITNNLSIVILDLRPSDEGTYECVVQKYEKDAFKREHLAEVT

SEQ ID NO: 133 - protein, 101 aa, Artificial Sequence
  CD80 v179 IgV
VIHVTKEVKEVATLSCGYNVSVEELTQTRIYWQKDKKMVLTMMSGDMNIWPEYKNRTIFDITNNLSIVILDLRPSDEGTYECVVQKYEKDAFKREHLAEVT

SEQ ID NO: 134 - protein, 101 aa, Artificial Sequence
  CD80 v180 IgV
VIHVTKEVKEVATLSCGHNVSVEELAQTRIYWQKDKKMVLTMMSGDLNIWPEYKNRTIFDITNNLSIVILALRPSDEGTYECVVLKYEKDAFKREHLAEVT

SEQ ID NO: 135 - protein, 101 aa, Artificial Sequence
  CD80 v181 IgV
VIHVTKEVKEVATLSCGHNVSVDELAQTRIYWQKEKKMVLTVISGDMNIWPEYKNRTVFDITNNLSIVIRALRPSDEGTYECVVLKYEKDAFKREHLAEVT

SEQ ID NO: 136 - protein, 101 aa, Artificial Sequence
  CD80 v182 IgV
VIHVTKEVKEVATLSCGHNVSVEELAQTRIYWQKEKKMVLTMMSGDMNIWPEYKNRTIFDITNNLSIMIMDLRPSDEGTYECVVLKYEKDAFKRKHLAEVT

SEQ ID NO: 137 - protein, 101 aa, Artificial Sequence
  CD80 v183 IgV
VIHVTKEVKEVATLSCGHNVSVEELAQTRIYWQKEKKMVLTMMSGDMNIWPEYKIRIIFDITNNLSIVFLALRPSDEGTYECVVLKYEKDAFKREHLAEVT

SEQ ID NO: 138 - protein, 101 aa, Artificial Sequence
  CD80 v184 IgV
VIHVTKEVKEVATLSCGHNVSVEELAQTRIYWQKDKKMVLTMISGDMNIWPEYKNRTIFDITNNLSIVILDLRPSDEGTYECVVLKYEKDAFKREHLAEVT

SEQ ID NO: 139 - protein, 101 aa, Artificial Sequence
  CD80 v185 IgV
VIHVTKEVKEVATLSCGHNVSVEELAQTRIYWQKEKKMVLSMMSGDMNIWPEYKNRIIFDITNNLSIVIRALRPSDEGTYECVVLKYEKDAFKREHLAEVT

SEQ ID NO: 140 - protein, 101 aa, Artificial Sequence
  CD80 v186 IgV
VIHVTKEVKEVATLSCGYNVSVEELAQTRIYWQKEKKMVLTMMSGDMNIWPEYKNRTIFDITNNLSIVILDPRPSDEGTYECVVLKYVKDAFKREHLAEVT

SEQ ID NO: 141 - protein, 101 aa, Artificial Sequence
  CD80 v187 IgV
VIHVTKEVKEVATLSCGHNISVEELAQTRIYWQKEKKMVLTMMSGDMNIWPEYKNRTIFDITNNLSIVILDLRPSDEGTYECVVLKYEKDAFKREHLAEVT

SEQ ID NO: 142 - protein, 101 aa, Artificial Sequence
  CD80 v188 IgV
VIHVTKEVKEVATLSCGHNVSVGELSQTRIYWQKDKKMVLTMMSGDMNIWPEYKNRTIFDINNNLSIVILDVRPSDEGTYECVVMKYEKDAFKREHLAEVT

SEQ ID NO: 143 - protein, 101 aa, Artificial Sequence
  CD80 v189 IgV
VIHVTKEVKEVTTLSCGHNVSVEDLAQTRIYWQKDKKMVLTMMSGVMNIWPEYKNRTIFDVTNNLSIVILAPRPSDEGTYECVVLKYEKDAFKRVHLAEVT

SEQ ID NO: 144 - protein, 101 aa, Artificial Sequence
  CD80 v190 IgV
VIHVTKEVKEVATLSCGHNVSLEELAQTRIYWQKDKKMVLTMLSGDMNIWPEYKNRTIFDITNNLSIVILGLRPSHEGTYECVVLKYEKDAFKREHLAEVT

SEQ ID NO: 145 - protein, 101 aa, Artificial Sequence
  CD80 v191 IgV
VIHVTKEVKEVATLSCGHNVSVEELAQTRIYWQKGKKMVLTMMSGDMNIWPEYENRTIFDITNNLSIVILDPRPSDEGTYECVVLKYEKDAFKREHLAEVT

SEQ ID NO: 146 - protein, 101 aa, Artificial Sequence
  CD80 v192 IgV
VIHVTKEVKEVATLSCGHNVSVEELAQTRIYWQKEKKMVLTMMSGDMNIWPEYKNRTIFDITNNLSIVIQDLRPSDEGTYECVVLKYEKDAFKREHLAEVT

SEQ ID NO: 147 - protein, 101 aa, Artificial Sequence
  CD80 v193 IgV
VIHVTKEVKEVATLSCGHNVSVEELEQTRIYWQKDKKMVLTMMSGDLNIWPEYKNRTIFDITNNLSIVILALRPSDEGTYECVVQKYEKDAFKREHLAEVT

SEQ ID NO: 148 - protein, 101 aa, Artificial Sequence
  CD80 v194 IgV
VIHVTKEVKEVATLSCGHNVSVEELAQTRIYWQKEKKMVLTMMSGEMNIWPEYKNRTIFDITNNLSIVILDLRPSDEGTYECVVLKYEKDAFKREHLAEVT

SEQ ID NO: 149 - protein, 101 aa, Artificial Sequence
  CD80 v195 IgV
VIHVTKEVKEVATLSCGHNVSVEELAQTRIHWQKDKKMVLSMMSGDMNIWPEYKNRTIFDITNNLSILILALRPSDEGTYECVVLKYEKDAFRWEHLAEVT

SEQ ID NO: 150 - protein, 107 aa, Artificial Sequence
  CD80 WT IgV
VIHVTKEVKEVATLSCGHNVSVEELAQTRIYWQKEKKMVLTMMSGDMNIWPEYKNRTIFDITNNLSIVILALRPSDEGTYECVVLKYEKDAFKREHLAEVTLSVKAD

SEQ ID NO: 151 - protein, 107 aa, Artificial Sequence
  CD80 v122 IgV
VIHVTKEVKEVATLSCGHNVSVEELAQTRIYWQKEKKMVLTMMSGDMNIWPEYKNRTIFDITNNLSIVIPALRPSDEGTYECVVLKYEKDAFKREHLAEVTLSVKAD

SEQ ID NO: 152 - protein, 107 aa, Artificial Sequence
  CD80 v123 IgV
VIHVTKEVKEVATLSCGHNVSVEELAQTRFYWQKEKKMVLTMMSGDMNIWPEYKNRTIFDITNNLSIVIPALRPSDEGTYECVVLKYEKDAFKREHLAEVTLSVKAD

SEQ ID NO: 153 - protein, 107 aa, Artificial Sequence
  CD80 v124 IgV
VIHVTKEVKEVATLSCGHNVSVEELAHTRIYWQKEKKMVLSMMSGDMNIWPEYKNRTIFDITNNLSIVILDLRPSDEGTYECVVLKYEKDAFKREHLAEVTLSVKAD

SEQ ID NO: 154 - protein, 107 aa, Artificial Sequence
  CD80 v125 IgV
VIHVTKEVKEVATLSCGHNVSVEELAQTRTYWQKEKKMVLTMMSGDMNIWPEYKNRTIFDITNNLSIVIRALRPSDEGTYECVVLKYEKDAFKREHLAEVTLSVKAD

SEQ ID NO: 155 - protein, 107 aa, Artificial Sequence
  CD80 v126 IgV
VIHVTKEVKEVARLSRGHNVSVEELAQTRIYWQKEKKMVLTMMSGDMNIWPEYKNRTIFDITNNLSIVIQDLRPSDEGTYECVVLKYEKDAFKREHLAEVTLSVKAD

SEQ ID NO: 156 - protein, 107 aa, Artificial Sequence
  CD80 v127 IgV
VIHVTKEVKEVATLSCGHNVSVEELAQTRIYWQKEKKMVLTMMSGDMNIWPEYKNRIIFDITNNLSIVILALRPSDEGTYECVVLKYEKDAFKREHLAEVTLSVKAD

SEQ ID NO: 157 - protein, 107 aa, Artificial Sequence
  CD80 v128 IgV
VIHVTKEVKEVATLSCGHNVSVEELAQTRIYWQKEKKMVLTMISGDMNIWPEYKNRTIFDITNNLSIVILALRPSDEGTYERVVLKYEKDAFKREHLAEVTLSVKAD

SEQ ID NO: 158 - protein, 107 aa, Artificial Sequence
  CD80 v130 IgV
VIHVTKEVKEVATLSCGHNVSLEELAQTRIYWQKEKKVVLTMMSGDTNIWPEYKNRTIFDITNNLSIVILDLRPSDEGTYECVVMKYEKDAFKREHLAEVTLSVKAD

SEQ ID NO: 159 - protein, 107 aa, Artificial Sequence
  CD80 v131 IgV
VIHVTKEVKEVATLSCGHNVSVEELAQTRVYWQKEKKMVLTMMSGDMNIWPEYKNRIIFDITNNLSIVIPDLRPSDEGTYECVVLKYEKDTFKREHLAEVTLSVKAD

SEQ ID NO: 160 - protein, 107 aa, Artificial Sequence
  CD80 v132 IgV
VIHVTKEVKEVATLSCGHNVSIEELAQTRIYWQKEKKMVLTMMSGDMNIWPEYKNRTIFDITNNLSIVIMDLRPSDEGTYECVVLKYEKDAFKREHLAEVTLSVKAD

SEQ ID NO: 161 - protein, 107 aa, Artificial Sequence
  CD80 v133 IgV
VIHVTKEVKEVATLSCGHNVSVEELAQTRIYWQKEKKMVLTMMSGDMNIWPEYKDRTIFDITNNLSIVIPALRPSDGGTYECVVLKYEKDAFKREHLAEVTLSVKAD

SEQ ID NO: 162 - protein, 107 aa, Artificial Sequence
  CD80 v134 IgV
VIHVTKEVKEVATLSCGHNVSVEELAQTRIYWQKEKKMVLTMMSGDMNIWPEYKNRAIFDITNNLSIVTLALRPSDEGTYECVVLKYEKDAFKREHLAEVTLSVKAD

SEQ ID NO: 163 - protein, 107 aa, Artificial Sequence
  CD80 v135 IgV
VIHVTKEVKEVATLSCGHNVSVEELAQTRIYWQKEKKMVLTMMSGDMNIWPEYKDRTIFDITNNLSIVILALRPSDEGTYECVVLMYEKDAFKREHLAEVTLSVKAD

SEQ ID NO: 164 - protein, 107 aa, Artificial Sequence
  CD80 v136 IgV
VIHVTKEVKEVATLSCGHNVSVEELAQTRIYWQKEKKMVLTMMSGDMNIWPEYKNRTIFDITNNLSIVILAPRPSDEGIYECVVLKYEKDAFKREHLAEVTLSVKAD

SEQ ID NO: 165 - protein, 107 aa, Artificial Sequence
  CD80 v137 IgV
VIHVTKEVKEVATLSCGHNVSVEELAQTRIYWQKEKKMVLTMMSGDMNIWPEYKNRTIFDITNNLSIVIPALRPSDEGTYECVVLKYEKDASKREHLAEVTLSVKAD

SEQ ID NO: 166 - protein, 107 aa, Artificial Sequence
  CD80 v138 IgV
VIHVTKEVKEVATLSCGHNVSVEELAQTRIYWQKEKKMVLTMMSGDMNIWPEYKNRTIFDITNNLSIVILALRPSDEGPYECVVLKYEKDAFKREHLAEVTLSVKAD

SEQ ID NO: 167 - protein, 107 aa, Artificial Sequence
  CD80 v139 IgV
VIHVTKEVKEVATLSCGHNVSVEELAQTRIYWQKDKKMVLTMMSGDINIWPEYKNRTIFDITNNPSIVILALRPSDEGTYECVVLKYEKNAFKREHLAEVTLSVKAD

SEQ ID NO: 168 - protein, 107 aa, Artificial Sequence
  CD80 v140 IgV
VIHVTKEVKEVATLSCGHNVSVEESAQTRIYWQKDKKMVLTMMSGDINIWPEYKNRTIFDITNNLSIVILALRPSDEGTYECVVLKYEKNAFKREHLAEVTLSVKAD

SEQ ID NO: 169 - protein, 107 aa, Artificial Sequence
  CD80 v141 IgV
VIHVTKEVKEVATLSCGHNVSVEELAQTRIYWQKEKKMVLTMMPGDMNIWPEYKNRTIFDITNNLSTVILALRSSDEGTYGCVVLKYEKDAFKRDHLAEVTLSVKAD

SEQ ID NO: 170 - protein, 107 aa, Artificial Sequence
  CD80 v142 IgV
VIHVTKEVKEVATLSCGHNVSVEELAQTRIYWQKEKKMVLTMMSGDMNIWPEYKNRTIFDITNNLSIVILDLRPSDEGTYECVVLKYEKDAFKREHLAEVTLSVKAD

SEQ ID NO: 171 - protein, 107 aa, Artificial Sequence
  CD80 v143 IgV
VIHVTKEVKEVAALSCGHNVSVEELAQTRIYWQKEKKMVLTMMSGDMNIWPEYKNRTIFDNTNNLSIVILDLRPSDEGTYECVVLKYEKDAFKREHLAEVTLSVKAD

SEQ ID NO: 172 - protein, 107 aa, Artificial Sequence
  CD80 v144 IgV
VIHVTKEVKEVATLSCGHNVSVEELAQTRIYWQKEKKMVLTMMSGDMNIWPEYKNRTIFDITNNLSIVILALRPSDEGTYKCVVLKYEKDSFKREHLAEVTLSVKAD

SEQ ID NO: 173 - protein, 107 aa, Artificial Sequence
  CD80 v145 IgV
VIHVTKEVKEVVTLSCGHNVSVEELAQTRIYWQKEKKMVLTMMSGDVNIWPEYKNRTIFDITNNLSIVIMALRPSDEGTYECVVLKYEKDAFKREHLAEVTLSVKAD

SEQ ID NO: 174 - protein, 107 aa, Artificial Sequence
  CD80 v146 IgV
VIHVTKEVKEVATLSCGHNVSVEELAQTRIYWQEEKKMVLAMMSGDMNIWPEYKNRTIFDITNNLSIVILAVRPSDEGTYECVVLKYEKDAFKREHLAEVTLSVKAD

SEQ ID NO: 175 - protein, 107 aa, Artificial Sequence
  CD80 v147 IgV
VIHVTKEVKEVATLSCGHNVSVEELAQTRIYWQKEKKMVLSMMSGDMNIWPEYKNRTIFDITNNLSIVILDLRPSDEGTYECVALKYEKDAFKREHLAEVTLSVKAD

SEQ ID NO: 176 - protein, 107 aa, Artificial Sequence
  CD80 v148 IgV
VIHVTKEVKEVATLSCGHNVSVEELAQTRIYWQKDKKMVLTMMSGDMNIWPEYKNRTIFDITNNLSIVILDLRPSDEGTYECVVLKYEKDAFKREHLAEVTLSVKAD

SEQ ID NO: 177 - protein, 107 aa, Artificial Sequence
  CD80 v149 IgV
VIHVTKEVKEVATLSCGHNVSVEELAQTRIYWQKDKKMVLTMMSGDINIWPEYKNRTIFDITNNLSIVILALRPSDEGTYECVVLKYEKDAFKREHLAEVTLSVKAD

SEQ ID NO: 178 - protein, 107 aa, Artificial Sequence
  CD80 v150 IgV
VIHVTKEVKEVATLSCGHNVSVEELAQTRIYWQKERKMVLTMMSGDMNIWPEYKNRTIFDITNNLSIVILALRPSDEATYECVVLKYEKDAFKREHLAEVTLSVKAD

SEQ ID NO: 179 - protein, 107 aa, Artificial Sequence
  CD80 v151 IgV
VIHVTKEVKEVATLSCGHNVSVEELAQTRIYWEKEKKMVLAMMSGDMNIWPEYKNRTIFDITNNLSIVILALRPSDEGTYECVVLKYEKDAFKREHLAEVTLSVKAD

SEQ ID NO: 180 - protein, 107 aa, Artificial Sequence
  CD80 v152 IgV
VIHVTKEVKEVATLSCGHNVSVEELAQTRIYWQKEKKMVLTMMSGDVHIWPEYKNRTIFDITNNLSIVILALRPSDEGTYECVVLKYEKDAFKREHLAEVTLSVKAD

SEQ ID NO: 181 - protein, 107 aa, Artificial Sequence
  CD80 v153 IgV
VIHVTKEVKEVATLSCGHNVSVEELAQTRIYWQKEKKMVLTMMSGDLNIWPEYKNRTIFDITNNLSIAILALRPSDEGTYECVVLKYEKDAFKREHLAEVTLSVKAD

SEQ ID NO: 182 - protein, 107 aa, Artificial Sequence
  CD80 v154 IgV
VIHVTKEVKEVATLSCGHNVSVEELAQTRIYWQKEKKMVLTMMPGDMNIWPEYKNRTIFDITNNLSIVILDLRPSDEGTYECVVLKYEKDAFKREHLAEVTLSVKAD

SEQ ID NO: 183 - protein, 107 aa, Artificial Sequence
  CD80 v155 IgV
VIHVTKEVKEVATLSCGHNVSVEELAHTRIYWQKEKKMVLTMISGDMNIWPEYKNRTIFDITNNLSIVILDLSPSDEGTYECVVLKYEKDAFKREHLAEVTLSVKAD

SEQ ID NO: 184 - protein, 107 aa, Artificial Sequence
  CD80 v156 IgV
  VARIANT (24)..(24): Xaa is unknown
VIHVTKEVKEVATLSCGHNVSVEXLAQTRIYWRKEKKMVLTMMSGDMNIWPEYNNRIIFDITNNLSVVILDLRPSDEGTYECVVLKYEKDAFKREHLAEVTLSVKAD

SEQ ID NO: 185 - protein, 107 aa, Artificial Sequence
  CD80 v157 IgV
VIHVTKEVKEVATLSCGHNVSVEELAQTRIYWQKDKKMVLTMMSGDMNIWPEYKNRIIFDITNNLSIVIQDLRPSDEGTYECVVLKYEKDAFKREHLAEVTLSVKAD

SEQ ID NO: 186 - protein, 107 aa, Artificial Sequence
  CD80 v158 IgV
VIHVTKEVKEVATLSCGHNVSVEELAQTRIYWQKEKKMVLTMMSGDINIWPEYKNRTIFDITNNLSIVILALRPSDEGTYECVVLKYDKDAFKREHLAEVTLSVKAD

SEQ ID NO: 187 - protein, 107 aa, Artificial Sequence
  CD80 v159 IgV
VIHVTKEVKEVATLSCGHNVSVEELAQTRIYWQKEKKMVLTIMSGDMNIWPEYKNRTIFDVTNNLSIVILDLRPSDEGTYECVVLKYEKDAFKREHLAEVTLSVKAD

SEQ ID NO: 188 - protein, 107 aa, Artificial Sequence
  CD80 v160 IgV
VIHVTKEVKEVATLSCGHNVSVEELAQTRIYWQKEKKMVLTMMSGDMNIWAEYKNRTIFDITNNLSIVILDLRPSDEGTYECVVLKYEKDAFKREHLAEVTLSVKAD

SEQ ID NO: 189 - protein, 107 aa, Artificial Sequence
  CD80 v161 IgV
VIHVTKEVKEVATLSCGYNVSVEELAQTRIYWQKEKKMVLTMMSGDINIWPEYKNRIIFDITNNLSIVILGLRPSDEGTYECVVLKYEKDAFKREHLAEVTLSVKAD

SEQ ID NO: 190 - protein, 107 aa, Artificial Sequence
  CD80 v162 IgV
VIHVTKEVKEVATLSCGHNISVEELAQTRIYWQKEKKMVLTMMSGDVNIWPEYKNRIIFDITNNLSIVILALRPSDEGTYECVILKYEKDAFKREHLAEVTLSVKAD

SEQ ID NO: 191 - protein, 107 aa, Artificial Sequence
  CD80 v163 IgV
VIHVTKEVKEVATLSCGHNISVEELAQTRIYWQKEKKMVLTMMSGDVNIWPEYKNRTIFDITNNLSIVILDLRPSDEGTYECVVLKYEKDAFKREHLAEVTLSVKAD

SEQ ID NO: 192 - protein, 107 aa, Artificial Sequence
  CD80 v164 IgV
VIHVTKEVKEVATLSCGHNVSVEELAQTRIYWQKEKKMVLTMMSGDMNIWPEYKNRTIFDITNNLSIVILDVRPSDEGTYECVVLKYEKDAFKRKHLAEVTLSVKAD

SEQ ID NO: 193 - protein, 107 aa, Artificial Sequence
  CD80 v165 IgV
VIHVTKEVKEVATLSCGHNVSLEELAQTRIYWQKGKKMVLTMMSGDMNIWPEYKNRTIFDITNNLSIVILDPRPSDEGTYECVVLKYEKDAFKREHLAEVTLSVKAD

SEQ ID NO: 194 - protein, 107 aa, Artificial Sequence; identical to SEQ ID NO: 176
  CD80 v166 IgV

SEQ ID NO: 195 - protein, 107 aa, Artificial Sequence
  CD80 v167 IgV
VIHVTKEVKEVATLSCGHNVSVEELAQTRIYWQKDKKMVLTMMSGDMNIWPEYKNRTIFDITNNLSLVILDLRPSDEGTYECVVLKYEKDAFKREHLAEVTLSVKAD

SEQ ID NO: 196 - protein, 107 aa, Artificial Sequence
  CD80 v168 IgV
VIHVTKEVKEVATLSCGHNVSVEELAHTRIYWQKGKKMVLTMMSGDMNIWPEYKNRTIFDITNNLSIVILDPRPSDEGIYECVVLKYEKDAFKREHLAEVTLSVKAD

SEQ ID NO: 197 - protein, 107 aa, Artificial Sequence
  CD80 v169 IgV
VIHVTKEVKEVARLSCGHNVSVEELAQTRIYWQKEKKMVLTVMSGDINIWPEYKNRTIFDITNNLSIVILDLRPSDEGTYECVVLKYEKDAFKREHLAEVTLSVKAD

SEQ ID NO: 198 - protein, 107 aa, Artificial Sequence
  CD80 v170 IgV
VIHVTKEVKEVATLSCGHNVSVEELAQTRIYWQKDKKMVLTMMSGDMNIWPEYKNRTIFDITNNLSIVILALRPSDEGTYECVVLKYEKDAFKREHLAEVTLSVKAD

SEQ ID NO: 199 - protein, 107 aa, Artificial Sequence
  CD80 v171 IgV
VIHVTKEVKEVATLSCGHNVSVEELAQTRIYWQKDKKMVLTMMSGDINIWPEYKNRTIFDITNNLSIVIMALRPSDEGTYECVVLKYEKDAFKREHLAEVTLSVKAD

SEQ ID NO: 200 - protein, 107 aa, Artificial Sequence
  CD80 v172 IgV
VIHVTKEVKEVATLSCGHNVSVEELAQTRIYWQKDKKMVLTMMSGDMNIWPEYKNRTIFDITNNLSIVILDVRPSDEGTYECVVLKYEKDAFKREHLAEVTLSVKAD

SEQ ID NO: 201 - protein, 107 aa, Artificial Sequence
  CD80 v173 IgV
VIHVTKEVKEVATLSCGHNVSVEELAQTRIYWQKDKKMVLTMLSGDMNIWPEYKNRTIFDITNNLSIVIMALRPSDEGTYECVVLKYEKDAFKREHLAEVTLSVKAD

SEQ ID NO: 202 - protein, 107 aa, Artificial Sequence
  CD80 v174 IgV
VIHVTKEVKEVATLSCGHNVSVEELPQTRIYWQKDKKMVLTMISGDMNIWPEYKNRTIFDITNNLSIVILALRPSDEGTYECVVQKYDKDAFKREHLAEVTLSVKAD

SEQ ID NO: 203 - protein, 107 aa, Artificial Sequence
  CD80 v175 IgV
VIHVTKEVKEVATLSCGHNVSVEELAQTRIYWQKDKKMVLTMMSGVMNIWPEYKNRTIFDITNNLSIVILALRPSDEGTYECVVQKYEKDAFKREHLAEVTLSVKAD

SEQ ID NO: 204 - protein, 107 aa, Artificial Sequence
  CD80 v176 IgV
VIHVTKEVKEVATLSCGHNVSVEELALTRIYWQKDKKMVLTMMSGDINIWPEYKNRIIFDITNNLSIVIQALRPSDEGTYECVVLKYDKDAFKREHLAEVTLSVKAD

SEQ ID NO: 205 - protein, 107 aa, Artificial Sequence
  CD80 v177 IgV
VIHVTKEVKEVATLSCGHNVSVEELAQTRIYWQKEKKMVLTMMSGDVNIWPEYKNRTIFDITNNLSIVFLDLRPSDEGTYECIVLKYEKDAFKREHLAEVTLSVKAD

SEQ ID NO: 206 - protein, 107 aa, Artificial Sequence
  CD80 v178 IgV
VIHVTKEVKEVATLSCGHNVSVEELAQTRIYWQKDKKMVLTMMSGDMNIWPEYKNRAIFDITNNLSIVILDLRPSDEGTYECVVQKYEKDAFKREHLAEVTLSVKAD

SEQ ID NO: 207 - protein, 107 aa, Artificial Sequence
  CD80 v179 IgV
VIHVTKEVKEVATLSCGYNVSVEELTQTRIYWQKDKKMVLTMMSGDMNIWPEYKNRTIFDITNNLSIVILDLRPSDEGTYECVVQKYEKDAFKREHLAEVTLSVKAD

SEQ ID NO: 208 - protein, 107 aa, Artificial Sequence
  CD80 v180 IgV
VIHVTKEVKEVATLSCGHNVSVEELAQTRIYWQKDKKMVLTMMSGDLNIWPEYKNRTIFDITNNLSIVILALRPSDEGTYECVVLKYEKDAFKREHLAEVTLSVKAD

SEQ ID NO: 209 - protein, 107 aa, Artificial Sequence
  CD80 v181 IgV
VIHVTKEVKEVATLSCGHNVSVDELAQTRIYWQKEKKMVLTVISGDMNIWPEYKNRTVFDITNNLSIVIRALRPSDEGTYECVVLKYEKDAFKREHLAEVTLSVKAD

SEQ ID NO: 210 - protein, 107 aa, Artificial Sequence
  CD80 v182 IgV
VIHVTKEVKEVATLSCGHNVSVEELAQTRIYWQKEKKMVLTMMSGDMNIWPEYKNRTIFDITNNLSIMIMDLRPSDEGTYECVVLKYEKDAFKRKHLAEVTLSVKAD

SEQ ID NO: 211 - protein, 107 aa, Artificial Sequence
  CD80 v183 IgV
VIHVTKEVKEVATLSCGHNVSVEELAQTRIYWQKEKKMVLTMMSGDMNIWPEYKIRIIFDITNNLSIVFLALRPSDEGTYECVVLKYEKDAFKREHLAEVTLSVKAD

SEQ ID NO: 212 - protein, 107 aa, Artificial Sequence
  CD80 v184 IgV
VIHVTKEVKEVATLSCGHNVSVEELAQTRIYWQKDKKMVLTMISGDMNIWPEYKNRTIFDITNNLSIVILDLRPSDEGTYECVVLKYEKDAFKREHLAEVTLSVKAD

SEQ ID NO: 213 - protein, 107 aa, Artificial Sequence
  CD80 v185 IgV
VIHVTKEVKEVATLSCGHNVSVEELAQTRIYWQKEKKMVLSMMSGDMNIWPEYKNRIIFDITNNLSIVIRALRPSDEGTYECVVLKYEKDAFKREHLAEVTLSVKAD

SEQ ID NO: 214 - protein, 107 aa, Artificial Sequence
  CD80 v186 IgV
VIHVTKEVKEVATLSCGYNVSVEELAQTRIYWQKEKKMVLTMMSGDMNIWPEYKNRTIFDITNNLSIVILDPRPSDEGTYECVVLKYVKDAFKREHLAEVTLSVKAD

SEQ ID NO: 215 - protein, 107 aa, Artificial Sequence
  CD80 v187 IgV
VIHVTKEVKEVATLSCGHNISVEELAQTRIYWQKEKKMVLTMMSGDMNIWPEYKNRTIFDITNNLSIVILDLRPSDEGTYECVVLKYEKDAFKREHLAEVTLSVKAD

SEQ ID NO: 216 - protein, 107 aa, Artificial Sequence
  CD80 v188 IgV
VIHVTKEVKEVATLSCGHNVSVGELSQTRIYWQKDKKMVLTMMSGDMNIWPEYKNRTIFDINNNLSIVILDVRPSDEGTYECVVMKYEKDAFKREHLAEVTLSVKAD

SEQ ID NO: 217 - protein, 107 aa, Artificial Sequence
  CD80 v189 IgV
VIHVTKEVKEVTTLSCGHNVSVEDLAQTRIYWQKDKKMVLTMMSGVMNIWPEYKNRTIFDVTNNLSIVILAPRPSDEGTYECVVLKYEKDAFKRVHLAEVTLSVKAD

SEQ ID NO: 218 - protein, 107 aa, Artificial Sequence
  CD80 v190 IgV
VIHVTKEVKEVATLSCGHNVSLEELAQTRIYWQKDKKMVLTMLSGDMNIWPEYKNRTIFDITNNLSIVILGLRPSHEGTYECVVLKYEKDAFKREHLAEVTLSVKAD

SEQ ID NO: 219 - protein, 107 aa, Artificial Sequence
  CD80 v191 IgV
VIHVTKEVKEVATLSCGHNVSVEELAQTRIYWQKGKKMVLTMMSGDMNIWPEYENRTIFDITNNLSIVILDPRPSDEGTYECVVLKYEKDAFKREHLAEVTLSVKAD

SEQ ID NO: 220 - protein, 107 aa, Artificial Sequence
  CD80 v192 IgV
VIHVTKEVKEVATLSCGHNVSVEELAQTRIYWQKEKKMVLTMMSGDMNIWPEYKNRTIFDITNNLSIVIQDLRPSDEGTYECVVLKYEKDAFKREHLAEVTLSVKAD

SEQ ID NO: 221 - protein, 107 aa, Artificial Sequence
  CD80 v193 IgV
VIHVTKEVKEVATLSCGHNVSVEELEQTRIYWQKDKKMVLTMMSGDLNIWPEYKNRTIFDITNNLSIVILALRPSDEGTYECVVQKYEKDAFKREHLAEVTLSVKAD

SEQ ID NO: 222 - protein, 107 aa, Artificial Sequence
  CD80 v194 IgV
VIHVTKEVKEVATLSCGHNVSVEELAQTRIYWQKEKKMVLTMMSGEMNIWPEYKNRTIFDITNNLSIVILDLRPSDEGTYECVVLKYEKDAFKREHLAEVTLSVKAD

SEQ ID NO: 223 - protein, 107 aa, Artificial Sequence
  CD80 v195 IgV
VIHVTKEVKEVATLSCGHNVSVEELAQTRIHWQKDKKMVLSMMSGDMNIWPEYKNRTIFDITNNLSILILALRPSDEGTYECVVLKYEKDAFRWEHLAEVTLSVKAD

SEQ ID NO: 224 - protein, 208 aa, Artificial Sequence
  CD80 v196 ECD
VIHVTKEVKEVATLSCGHNVSVEELEQTRIYWRKDKKMVLTMMSGDLNIWPEYKNRTIFDITNNLSIVILALRPSDEGTYECVVQEYEKDAFKREHLAEVTLSVKADFPTPSISDFETPTSNIRRIICSTSGGFPEPHLSWLENGEELNAINTTVSQDPETELYAVSSKLDFNMTTNHSFMCLIKYGHLRVNQTFNWNTTKQEHFPDN

SEQ ID NO: 225 - protein, 208 aa, Artificial Sequence
  CD80 v197 ECD
VIHVTKEVKEVATLSCGHNVSVEELEQTRIYWRKDKKMVLTMMSGDLNIWPEYKNRTIFDITNNLSIVILALRPSDEGTYECVVQKYEKDAFKREHLAEVTLSVKADFPTPSISDFETPTSNIRRIICSTSGGFPEPHLSWLENGEELNAINTTVSQDPETELYAVSSKLDFNMTTNHSFMCLIKYGHLRVNQTFNWNTTKQEHFPDN

SEQ ID NO: 226 - protein, 208 aa, Artificial Sequence
  CD80 v198 ECD
VIHVTKEVKEVATLSCGHNVSVEELAQTRIYWQKDKKMVLTMMSGDLNIWPEYKNRTIFDITNNLSIVILALRPSDEGTYECVVQKYEKDAFKREHLAEVTLSVKADFPTPSISDFETPTSNIRRIICSTSGGFPEPHLSWLENGEELNAINTTVSQDPETELYAVSSKLDFNMTTNHSFMCLIKYGHLRVNQTFNWNTTKQEHFPDN

SEQ ID NO: 227 - protein, 208 aa, Artificial Sequence
  CD80 v199 ECD
VIHVTKEVKEVATLSCGHNVSVEELEQTRIYWLKDKKMVLTMMSGDLNIWPEYKNRTIFDITNNLSIVILALRPSDEGTYECVVQKYEKDAFKREHLAEVTLSVKADFPTPSISDFETPTSNIRRIICSTSGGFPEPHLSWLENGEELNAINTTVSQDPETELYAVSSKLDFNMTTNHSFMCLIKYGHLRVNQTFNWNTTKQEHFPDN

SEQ ID NO: 228 - protein, 208 aa, Artificial Sequence
  CD80 v200 ECD
VIHVTKEVKEVATLSCGHNVSVEELEQTRIYWLKDKKMVLTMMSGDLNIWPEYKNRTIFDITNNLSIVILALRPSDEGTYECVVLKYEKDAFKREHLAEVTLSVKADFPTPSISDFETPTSNIRRIICSTSGGFPEPHLSWLENGEELNAINTTVSQDPETELYAVSSKLDFNMTTNHSFMCLIKYGHLRVNQTFNWNTTKQEHFPDN

SEQ ID NO: 229 - protein, 208 aa, Artificial Sequence
  CD80 v201 ECD
VIHVTKEVKEVATLSCGYNVSVEELEQTRIYWLKDKKMVLTMMSGDLNIWPEYKNRTIFDITNNLSIVILALRPSDEGTYECVVQKYEKDAFKREHLAEVTLSVKADFPTPSISDFETPTSNIRRIICSTSGGFPEPHLSWLENGEELNAINTTVSQDPETELYAVSSKLDFNMTTNHSFMCLIKYGHLRVNQTFNWNTTKQEHFPDN

SEQ ID NO: 230 - protein, 208 aa, Artificial Sequence
  CD80 v202 ECD
VIHVTKEVKEVATLSCGHNVSVEELAQTRIYWLKDKKMVLTMMSGDINIWPEYKNRTIFDITNNLSIVILALRPSDEGTYECVVLKYEKDAFKREHLAEVTLSVKADFPTPSISDFETPTSNIRRIICSTSGGFPEPHLSWLENGEELNAINTTVSQDPETELYAVSSKLDFNMTTNHSFMCLIKYGHLRVNQTFNWNTTKQEHFPDN

SEQ ID NO: 231 - protein, 208 aa, Artificial Sequence
  CD80 v203 ECD
VIHVTKEVKEVATLSCGYNVSVEELAQTRIYWLKDKKMVLTMMSGDINIWPEYKNRTIFDITNNLSIVILALRPSDEGTYECVVLKYEKDAFKREHLAEVTLSVKADFPTPSISDFETPTSNIRRIICSTSGGFPEPHLSWLENGEELNAINTTVSQDPETELYAVSSKLDFNMTTNHSFMCLIKYGHLRVNQTFNWNTTKQEHFPDN

SEQ ID NO: 232 - protein, 208 aa, Artificial Sequence
  CD80 v204 ECD
VIHVTKEVKEVATLSCGHNVSVEELAQTRIYWLKDKKMVLTMMSGEINIWPEYKNRTIFDITNNLSIVILALRPSDEGTYECVVLKYEKDAFKREHLAEVTLSVKADFPTPSISDFETPTSNIRRIICSTSGGFPEPHLSWLENGEELNAINTTVSQDPETELYAVSSKLDFNMTTNHSFMCLIKYGHLRVNQTFNWNTTKQEHFPDN

SEQ ID NO: 233 - protein, 208 aa, Artificial Sequence
  CD80 v205 ECD
VIHVTKEVKEVATLSCGHNVSVEELAQTRIYWRKDKKMVLTMMSGEINIWPEYKNRTIFDITNNLSIVILALRPSDEGTYECVVLKYEKDAFKREHLAEVTLSVKADFPTPSISDFETPTSNIRRIICSTSGGFPEPHLSWLENGEELNAINTTVSQDPETELYAVSSKLDFNMTTNHSFMCLIKYGHLRVNQTFNWNTTKQEHFPDN

SEQ ID NO: 234 - protein, 208 aa, Artificial Sequence
  CD80 v206 ECD
VIHVTKEVKEVATLSCGYNVSVEELAQTRIYWQKDKKMVLTMMSGDLNIWPEYKNRTIFDITNNLSIVILALRPSDEGTYECVVLKYEKDAFKREHLAEVTLSVKADFPTPSISDFETPTSNIRRIICSTSGGFPEPHLSWLENGEELNAINTTVSQDPETELYAVSSKLDFNMTTNHSFMCLIKYGHLRVNQTFNWNTTKQEHFPDN

SEQ ID NO: 235 - protein, 208 aa, Artificial Sequence
  CD80 v207 ECD
VIHVTKEVKEVATLSCGHNVSVEELAQTRIYWLKDKKMVLTMMSGDVNIWPEYKNRTIFDITNNLSIVILALRPSDEGTYECVVLKYEKDAFKREHLAEVTLSVKADFPTPSISDFETPTSNIRRIICSTSGGFPEPHLSWLENGEELNAINTTVSQDPETELYAVSSKLDFNMTTNHSFMCLIKYGHLRVNQTFNWNTTKQEHFPDN

SEQ ID NO: 236 - protein, 208 aa, Artificial Sequence
  CD80 v208 ECD
VIHVTKEVKEVATLSCGHNVSVEELAQTRIYWLKDKKMVLTMMSGDVNIWPEYKNRTIFDITNNLSIVILALRPSDEGAYECVVLKYEKDAFKREHLAEVTLSVKADFPTPSISDFETPTSNIRRIICSTSGGFPEPHLSWLENGEELNAINTTVSQDPETELYAVSSKLDFNMTTNHSFMCLIKYGHLRVNQTFNWNTTKQEHFPDN

SEQ ID NO: 237 - protein, 208 aa, Artificial Sequence
  CD80 v209 ECD
VIHVTKEVKEVATLSCGHNVSVEELAQTRIYWLKDKKMVLSMMSGDVNIWPEYKNRTIFDITNNLSIVILALRPSDEGTYECVVLKYEKDAFKREHLAEVTLSVKADFPTPSISDFETPTSNIRRIICSTSGGFPEPHLSWLENGEELNAINTTVSQDPETELYAVSSKLDFNMTTNHSFMCLIKYGHLRVNQTFNWNTTKQEHFPDN

SEQ ID NO: 238 - protein, 208 aa, Artificial Sequence
  CD80 v210 ECD
VIHVTKEVKEVATLSCGHNVSVEELAQTRIYWLKDKKMVLTMMSGDINIWPEYKNRTIFDITNNLSIVILALRPSDEGTYECVVQKYEKDAFKREHLAEVTLSVKADFPTPSISDFETPTSNIRRIICSTSGGFPEPHLSWLENGEELNAINTTVSQDPETELYAVSSKLDFNMTTNHSFMCLIKYGHLRVNQTFNWNTTKQEHFPDN

SEQ ID NO: 239 - protein, 208 aa, Artificial Sequence
  CD80 v211 ECD
VIHVTKEVKEVATLSCGHNVSVEELAQTRIYWLKDKKMVLTMMSGDINIWPEYKNRTIFDINNNLSIVILALRPSDEGTYECVVQKYEKDAFKREHLAEVTLSVKADFPTPSISDFETPTSNIRRIICSTSGGFPEPHLSWLENGEELNAINTTVSQDPETELYAVSSKLDFNMTTNHSFMCLIKYGHLRVNQTFNWNTTKQEHFPDN

SEQ ID NO: 240 - protein, 208 aa, Artificial Sequence
  CD80 v212 ECD
VIHVTKEVKEVATLSCGHNVSVEELAQTRIYWLKDKKMVLTMMSGDVNIWPEYKNRTIFDITNNLSIVILALRPSDEGTYECVVQKYEKDAFKREHLAEVTLSVKADFPTPSISDFETPTSNIRRIICSTSGGFPEPHLSWLENGEELNAINTTVSQDPETELYAVSSKLDFNMTTNHSFMCLIKYGHLRVNQTFNWNTTKQEHFPDN

SEQ ID NO: 241 - protein, 208 aa, Artificial Sequence
  CD80 v213 ECD
VIHVTKEVKEVATLSCGHNVSVEELEQTRIYWQKDKKMVLTMTSGDLNIWPEYKNRTIFDITNNLSIVILALRPSDEGTYECVVQKYEKDAFKQEHLAEVTLSVKADFPTPSISDFETPTSNIRRIICSTSGGFPEPHLSWLENGEELNAINTTVSQDPETELYAVSSKLDFNMTTNHSFMCLIKYGHLRVNQTFNWNTTKQEHFPDN

SEQ ID NO: 242 - protein, 208 aa, Artificial Sequence
  CD80 v214 ECD
VIHVTKEVKEVATLSCGHNVSVEELAQTRIYWRKDKEMVLTMMSGDVNIWPEYKNRTIFDITNNLSIVILALRPSDEGTYECVVQKYEKDAFKREHLAEVTLSVKADFPTPSISDFETPTSNIRRIICSTSGGFPEPHLSWLENGEELNAINTTVSQDPETELYAVSSKLDFNMTTNHSFMCLIKYGHLRVNQTFNWNTTKQEHFPDN

SEQ ID NO: 243 - protein, 208 aa, Artificial Sequence
  CD80 v215 ECD
VIHVTKEVKEVATLSCGHNVSADELAQTRIYWLKDKKMVLTMMSGDVNIWPEYKNRTIFDITNNLSIVILALRPSDEGTYECVVLKYEKDAFKREHLAEVTLSVKADFPTPSISDFETPTSNIRRIICSTSGGFPEPHLSWLENGEELNAINTTVSQDPETELYAVSSKLDFNMTTNHSFMCLIKYGHLRVNQTFNWNTTKQEHFPDN

SEQ ID NO: 244 - protein, 208 aa, Artificial Sequence
  CD80 v216 ECD
VIHVTKEVKEVATLSCGHNVSVEDLAQTRIYWLKDKKMVLTMMSGDVNIWPEYRNRTIFDITNNLSIVILALRPSDEGTYECVVQKYEKDAFKREHLAEVTLSVKADFPTPSISDFETPTSNIRRIICSTSGGFPEPHLSWLENGEELNAINTTVSQDPETELYAVSSKLDFNMTTNHSFMCLIKYGHLRVNQTFNWNTTKQEHFPDN

SEQ ID NO: 245 - protein, 208 aa, Artificial Sequence
  CD80 v217 ECD
VIHVTKEVKEVATLPCGHNVSVEELAQTRIYWLKDKKMVLTMMSGDLNIWPEYKNRTIFDITNNLSIVILALRPSDEGTYECVVQKYEKDAFKREHLAEVTLSVKADFPTPSISDFETPTSNIRRIICSTSGGFPEPHLSWLENGEELNAINTTVSQDPETELYAVSSKLDFNMTTNHSFMCLIKYGHLRVNQTFNWNTTKQEHFPDN

SEQ ID NO: 246 - protein, 208 aa, Artificial Sequence
  CD80 v218 ECD
VIHVTKDVKEVATLSCGHNVSVEELAQTRIYWQKDKKMVLTMMSGDINIWPEYKNRTIFDITNNLSIVILALRPSDEGTYECVVLKYEKDAFKREHQAEVTLSVKADFPTPSISDFETPTSNIRRIICSTSGGFPEPHLSWLENGEELNAINTTVSQDPETELYAVSSKLDFNMTTNHSFMCLIKYGHLRVNQTFNWNTTKQEHFPDN

SEQ ID NO: 247 - protein, 208 aa, Artificial Sequence
  CD80 v219 ECD
VIHVTKEVKEVATLSCGHNVSVEELAQTRIYWLKDKKMVLSMISGDMNIWPEYKNRTIFDITNNLSIVILALRPSDEGTYECVVLKYEKDAFKREHLAEVTLSVKADFPTPSISDFETPTSNIRRIICSTSGGFPEPHLSWLENGEELNAINTTVSQDPETELYAVSSKLDFNMTTNHSFMCLIKYGHLRVNQTFNWNTTKQEHFPDN

SEQ ID NO: 248 - protein, 208 aa, Artificial Sequence
  CD80 v220 ECD
VIHVTKEVKEVATLSCGHNVSVEELAQTRIYWQKDKKMVLTMMSGDINIWPEYRNRTIFDITNNLSIVILALRPSDEGTYECVVEKYEKDAFKREHLAEVTLSVKADFPTPSISDFETPTSNIRRIICSTSGGFPEPHLSWLENGEELNAINTTVSQDPETELYAVSSKLDFNMTTNHSFMCLIKYGHLRVNQTFNWNTTKQEHFPDN

SEQ ID NO: 249 - protein, 208 aa, Artificial Sequence
  CD80 v221 ECD
VIHVTKEVKEVATLSCGHNVSVEELAQTRIYWKKDKKMVLTMMSGVMNIWPEYKNRTIFDITNNLSIVILALRPSDEGTYECVVQKYEKDAFKREHLAEVTLSVKADFPTPSISDFETPTSNIRRIICSTSGGFPEPHLSWLENGEELNAINTTVSQDPETELYAVSSKLDFNMTTNHSFMCLIKYGHLRVNQTFNWNTTKQEHFPDN

SEQ ID NO: 250 - protein, 208 aa, Artificial Sequence
  CD80 v222 ECD
VIHVTKEVKEVATLSCGHNVSVEELAQTRISWQKDKKMVLTMMSGDLNIWPEYKNRTIFDITNNLSIVILALRPSDEGLYECVVLKYGKDAFKREHLAEVTLSVKADFPTPSISDFETPTSNIRRIICSTSGGFPEPHLSWLENGEELNAINTTVSQDPETELYAVSSKLDFNMTTNHSFMCLIKYGHLRVNQTFNWNTTKQEHFPDN

SEQ ID NO: 251 - protein, 208 aa, Artificial Sequence
  CD80 v223 ECD
VIHVTKEVKEVATLSCGLNVSAEELAQTRIYWQKDKKMVLTMMSGDLTIWPEYKNRTIFDITNNLSIVILALRPSDEGTYECVVQKYEKDAFKREHLAEVTLSVKADFPTPSISDFETPTSNIRRIICSTSGGFPEPHLSWLENGEELNAINTTVSQDPETELYAVSSKLDFNMTTNHSFMCLIKYGHLRVNQTFNWNTTKQEHFPDN

SEQ ID NO: 252 - protein, 208 aa, Artificial Sequence
  CD80 v224 ECD
VIHVTKEVKEVATLSCGHNVSVEELAHTRIYWQKDKKMVLTMMSGDLNIWPEYKNRTIFDITNNLSIVILALRPSDEGTYECVVQKYEKDAFKQKHLAEVTLSVKADFPTPSISDFETPTSNIRRIICSTSGGFPEPHLSWLENGEELNAINTTVSQDPETELYAVSSKLDFNMTTNHSFMCLIKYGHLRVNQTFNWNTTKQEHFPDN

SEQ ID NO: 253 - protein, 208 aa, Artificial Sequence
  CD80 v225 ECD
VIHVTKEVKEVATLSCGHNVSVEELAQTRIYWKKDKKMVLTMMSGDVNIWPEYKNRTIFDITNNLSIVILALRPSDEGTYECVVLKYEEDAFRREHLAEVTLSVKADFPTPSISDFETPTSNIRRIICSTSGGFPEPHLSWLENGEELNAINTTVSQDPETELYAVSSKLDFNMTTNHSFMCLIKYGHLRVNQTFNWNTTKQEHFPDN

SEQ ID NO: 254 - protein, 208 aa, Artificial Sequence
  CD80 v226 ECD
VIHVTKEVKEVATLSCGHNVSVEELAQTRIYWQKDKKMVLTMMSGDINIWPEYKNRTIFDITNNLSIVILALRPSDAGTYECVVQKYEKDAFKWEHLAEVTLSVKADFPTPSISDFETPTSNIRRIICSTSGGFPEPHLSWLENGEELNAINTTVSQDPETELYAVSSKLDFNMTTNHSFMCLIKYGHLRVNQTFNWNTTKQEHFPDN

SEQ ID NO: 255 - protein, 208 aa, Artificial Sequence
  CD80 v227 ECD
VIHVTKEVKEVATLSCGHNVSVEELEQTRIYWQKDKKMVLTMISGDLNIWPEYKNRTIFDITNNLSIVILALRPSDEGTYECVVQEYEKDAFKWEHLAEVTLSVKADFPTPSISDFETPTSNIRRIICSTSGGFPEPHLSWLENGEELNAINTTVSQDPETELYAVSSKLDFNMTTNHSFMCLIKYGHLRVNQTFNWNTTKQEHFPDN

SEQ ID NO: 256 - protein, 208 aa, Artificial Sequence
  CD80 v228 ECD
VIHVTKEVKEVATLSCGHNVSVEELAHTRIYWLKDKKMVLTMMSGDVNIWPEYKDRTIFDITNNLSIVILALRPSDEGTYECVVQKYENDAFKREHLAEVTLSVKADFPTPSISDFETPTSNIRRIICSTSGGFPEPHLSWLENGEELNAINTTVSQDPETELYAVSSKLDFNMTTNHSFMCLIKYGHLRVNQTFNWNTTKQEHFPDN

SEQ ID NO: 257 - protein, 208 aa, Artificial Sequence
  CD80 v229 ECD
VIHVTKEVKEVATLSCGYNASVEELAQTRIYWLKDKKMVLTMMSGDVNIWPEFKNRTIFDITNNLSIVILALRPSDEGTYECVVLKYEKDAFKREHLAEVTLSVKADFPTPSISDFETPTSNIRRIICSTSGGFPEPHLSWLENGEELNAINTTVSQDPETELYAVSSKLDFNMTTNHSFMCLIKYGHLRVNQTFNWNTTKQEHFPDN

SEQ ID NO: 258 - protein, 208 aa, Artificial Sequence
  CD80 v230 ECD
VIHVTKEVKEVATLSCGHNVSAEELAQTRIYWQKDKKMVLTMMSGDMNIWPEYKNRTIFDITNNLSIEILDLRPSDEGTYECVVLKYEKDAFKREHLAEVTLSVKADFPTPSISDFETPTSNIRRIICSTSGGFPEPHLSWLENGEELNAINTTVSQDPETELYAVSSKLDFNMTTNHSFMCLIKYGHLRVNQTFNWNTTKQEHFPDN

SEQ ID NO: 259 - protein, 208 aa, Artificial Sequence
  CD80 v231 ECD
VIHVTKEVKEVATLSCGHNVSVEELAQTRIYWLKDKKMVLTMMSGDLNIWPEYKNRTIFDITNNLSIVILGLRPSDEGTYECVVLKYEKDASKREHLAEVTLSVKADFPTPSISDFETPTSNIRRIICSTSGGFPEPHLSWLENGEELNAINTTVSQDPETELYAVSSKLDFNMTTNHSFMCLIKYGHLRVNQTFNWNTTKQEHFPDN

SEQ ID NO: 260 - protein, 208 aa, Artificial Sequence
  CD80 v232 ECD
VIHVTKEVKEVATLSCGHNVSAEELAQTHIYWQKDKKMVLTMMSGEINIWPEYKNRTIFDITNNLSIVILALRPSDEGTYECVVLKYEKDAFKREHLAEVTLSVKADFPTPSISDFETPTSNIRRIICSTSGGFPEPHLSWLENGEELNAINTTVSQDPETELYAVSSKLDFNMTTNHSFMCLIKYGHLRVNQTFNWNTTKQEHFPDN

SEQ ID NO: 261 - protein, 208 aa, Artificial Sequence
  CD80 v233 ECD
VIHVTKEVKEVATLSCGHNVSVEELAQTRIYWLKDKKMVLTMISGDMNIWPEYKNRTIFDITNNLSIVILALRPSDEGTYECVVQKYEKDAFKWEHLAEVTLSVKADFPTPSISDFETPTSNIRRIICSTSGGFPEPHLSWLENGEELNAINTTVSQDPETELYAVSSKLDFNMTTNHSFMCLIKYGHLRVNQTFNWNTTKQEHFPDN

SEQ ID NO: 262 - protein, 208 aa, Artificial Sequence
  CD80 v234 ECD
VIHVTKEVKEVATLSCGYNVSVEELAQTRIYWQKDKKMVLTMMSGDMNIWPEYKNRTIFDITNNLSIMILALRPSDEGTYECVVLKYEKDAFKREHQAEVTLSVKADFPTPSISDFETPTSNIRRIICSTSGGFPEPHLSWLENGEELNAINTTVSQDPETELYAVSSKLDFNMTTNHSFMCLIKYGHLRVNQTFNWNTTKQEHFPDN

SEQ ID NO: 263 - protein, 208 aa, Artificial Sequence
  CD80 v235 ECD
VIHVTKEVKEVATLSCGHNVSVEELAQTRIYWLKDKKMVLTMMSGDLNIWPEYKNRTIFDITNNLSIMILALRPSDEGTYECVVQKYDKDAFKREHLAEVTLSVKADFPTPSISDFETPTSNIRRIICSTSGGFPEPHLSWLENGEELNAINTTVSQDPETELYAVSSKLDFNMTTNHSFMCLIKYGHLRVNQTFNWNTTKQEHFPDN

SEQ ID NO: 264 - protein, 208 aa, Artificial Sequence
  CD80 v236 ECD
VIHVTKEVKEVATLSCGHNVSVEELAQTRIYWLKDKKMVLTMVSGDINIWPEYKNRTIFDITNNLSIVILGLRPSDEGTYECVVLKYEKDAFKREHLAEVTLSVKADFPTPSISDFETPTSNIRRIICSTSGGFPEPHLSWLENGEELNAINTTVSQDPETELYAVSSKLDFNMTTNHSFMCLIKYGHLRVNQTFNWNTTKQEHFPDN

SEQ ID NO: 265 - protein, 208 aa, Artificial Sequence
  CD80 v237 ECD
VIHVTKEVKEVATLSCGHNVSVEELAQTRIYWQKDKKMVLTMMSGDLNIWPEYKNRTIFDITNNLSIVILGLRPSDEGTYECVVLKYEKDAFKREHQAEVTLSVKADFPTPSISDFETPTSNIRRIICSTSGGFPEPHLSWLENGEELNAINTTVSQDPETELYAVSSKLDFNMTTNHSFMCLIKYGHLRVNQTFNWNTTKQEHFPDN

SEQ ID NO: 266 - protein, 208 aa, Artificial Sequence
  CD80 v238 ECD
VIHVTKEVKEVATLSCGHNVSVEELAQTRIYWQKDKKMVLTMMSGDVNIWPEYKNRTIFDITNNLSIVILGLRPSDEGTYECVVMKYEKDAFKREHQAEVTLSVKADFPTPSISDFETPTSNIRRIICSTSGGFPEPHLSWLENGEELNAINTTVSQDPETELYAVSSKLDFNMTTNHSFMCLIKYGHLRVNQTFNWNTTKQEHFPDN

SEQ ID NO: 267 - protein, 208 aa, Artificial Sequence
  CD80 v239 ECD
VIHVTKEVKEVATLSCGYNVSVEELAQTRIHWQKDKKMVLTMMSGDVNIWPEYKNRTIFDITNNLSIVILGLRPSDEGTYECVVQKYEKDAFKREHLAEVTLSVKADFPTPSISDFETPTSNIRRIICSTSGGFPEPHLSWLENGEELNAINTTVSQDPETELYAVSSKLDFNMTTNHSFMCLIKYGHLRVNQTFNWNTTKQEHFPDN

SEQ ID NO: 268 - protein, 208 aa, Artificial Sequence
  CD80 v240 ECD
VIHVTKEVKEVATLSCGHNVSVEELAQTRIYWQKDKKMVLTMMSGEVNIWPEYKNRTIFDITNNLSIVILALRPSDEGTYECVVLKYEKDAFKREHQAEVTLSVKADFPTPSISDFETPTSNIRRIICSTSGGFPEPHLSWLENGEELNAINTTVSQDPETELYAVSSKLDFNMTTNHSFMCLIKYGHLRVNQTFNWNTTKQEHFPDN

SEQ ID NO: 269 - protein, 208 aa, Artificial Sequence
  CD80 v241 ECD
VIHVTKEVKEVATLSCGHNVSVEELAQTRIYWQKDKKMVLTMMSGVINIWPEYKNRTIFDITNNLSIVILGLRPSDEGTYECVVLKYEKDAVKREHLAEVTLSVKADFPTPSISDFETPTSNIRRIICSTSGGFPEPHLSWLENGEELNAINTTVSQDPETELYAVSSKLDFNMTTNHSFMCLIKYGHLRVNQTFNWNTTKQEHFPDN

SEQ ID NO: 270 - protein, 208 aa, Artificial Sequence
  CD80 v242 ECD
VIHVTKEVKEVATLSCGHNVSVEELAQTRIYWQKDKKMVLTMMSGDVNIWPEYKNRTIFDIANNLSIVILGLRPSDEGTYECAVLKHEKDAFKREHMAEVTLSVKADFPTPSISDFETPTSNIRRIICSTSGGFPEPHLSWLENGEELNAINTTVSQDPETELYAVSSKLDFNMTTNHSFMCLIKYGHLRVNQTFNWNTTKQEHFPDN

SEQ ID NO: 271 - protein, 208 aa, Artificial Sequence
  CD80 v243 ECD
VIHVTKEVKEVATLSCGHNVSVEELAQTRIYWLKDKKMVLTMMSGDMKIWPEYKNRTIFDITNNLSIVILALRPSDEGTYECVVQKYEKDAFKREHQAEVTLSVKADFPTPSISDFETPTSNIRRIICSTSGGFPEPHLSWLENGEELNAINTTVSQDPETELYAVSSKLDFNMTTNHSFMCLIKYGHLRVNQTFNWNTTKQEHFPDN

SEQ ID NO: 272 - protein, 208 aa, Artificial Sequence
  CD80 v244 ECD
VIHVTKEVKEVATLSCGHNVSVEELAQTRIYWQKDKKMVLTMMSGDMNIWPEYKNRTIFDITNNLSIVILALRPSDEGTYECVVQKYEKDAFTRVHQAEVTLSVKADFPTPSISDFETPTSNIRRIICSTSGGFPEPHLSWLENGEELNAINTTVSQDPETELYAVSSKLDFNMTTNHSFMCLIKYGHLRVNQTFNWNTTKQEHFPDN

SEQ ID NO: 273 - protein, 208 aa, Artificial Sequence
  CD80 v245 ECD
VIHVTKEVKEVATLSCGHNVSVEELAQTRIYWQKDKKMVLTMMSGDVKIWPEYKNRTIFDITNNLSIMILALRPSDEGTYECVVLKYENDAFKREHLAEVTLSVKADFPTPSISDFETPTSNIRRIICSTSGGFPEPHLSWLENGEELNAINTTVSQDPETELYAVSSKLDFNMTTNHSFMCLIKYGHLRVNQTFNWNTTKQEHFPDN

SEQ ID NO: 274 - protein, 208 aa, Artificial Sequence
  CD80 v246 ECD
VIHVTKEVKEVATLSCGHNVSVEELAQTRIYWLKDKKMVLTMMSGDIDIWPEYKNRTIFDITNNLSIVILGLRPSDEGTYECVVLKYEKDAFKREHLAEVTLSVKADFPTPSISDFETPTSNIRRIICSTSGGFPEPHLSWLENGEELNAINTTVSQDPETELYAVSSKLDFNMTTNHSFMCLIKYGHLRVNQTFNWNTTKQEHFPDN

SEQ ID NO: 275 - protein, 208 aa, Artificial Sequence
  CD80 v247 ECD
VIHVTKEVKEVATLSCGHNVSVEELAQTHIYWQKDKKMVLTMVSGDINVWPEYKNRTIFDITNNLSIVILALRPSDEGTYECVVLKYEKDAFKREHLAEVTLSVKADFPTPSISDFETPTSNIRRIICSTSGGFPEPHLSWLENGEELNAINTTVSQDPETELYAVSSKLDFNMTTNHSFMCLIKYGHLRVNQTFNWNTTKQEHFPDN

SEQ ID NO: 276 - protein, 208 aa, Artificial Sequence
  CD80 v248 ECD
VIHVTKEVKEVATLSCGHNVSVEELAHTRIYWQKDKKMVLTMMSGDINIWPEYKNRTIFDITNNLSIVILALRPSDEGTYECVVQKYEKGAFKREHLAEVTLSVKADFPTPSISDFETPTSNIRRIICSTSGGFPEPHLSWLENGEELNAINTTVSQDPETELYAVSSKLDFNMTTNHSFMCLIKYGHLRVNQTFNWNTTKQEHFPDN

SEQ ID NO: 277 - protein, 208 aa, Artificial Sequence
  CD80 v249 ECD
VIHVTKEVKEVATLSCGHNVSVEELAQTRIYWQKDKKMVLTMMSGDINIWPEYKNRTIFDITNNLSIVILALRPSDEGTYECVVQKYEKGAFKREHLAEVTLSVKADFPTPSISDFETPTSNIRRIICSTSGGFPEPHLSWLENGEELNAINTTVSQDPETELYAVSSKLDFNMTTNHSFMCLIKYGHLRVNQTFNWNTTKQEHFPDN

SEQ ID NO: 278 - protein, 208 aa, Artificial Sequence
  CD80 v250 ECD
VIHVTKEVKEVATLSCGHNVSVEELAQTRIYWQKDKKMVLTMMSGDINIWPEYKNRTIFDISNNLSIVILALRPSDEGTYECVVQKYEKDAFKREHLAEVTLSVKADFPTPSISDFETPTSNIRRIICSTSGGFPEPHLSWLENGEELNAINTTVSQDPETELYAVSSKLDFNMTTNHSFMCLIKYGHLRVNQTFNWNTTKQEHFPDN

SEQ ID NO: 279 - protein, 208 aa, Artificial Sequence
  CD80 v251 ECD
VIHVTKEVKEVATLSCGHNVSVEELEQTRIYWQKDKKMVLTMMSGDLNIWPEYKNRTIFDITNNLSIVILGLRPSDEGTYECVVLKYEKDAFKREHLAEVTLSVKADFPTPSISDFETPTSNIRRIICSTSGGFPEPHLSWLENGEELNAINTTVSQDPETELYAVSSKLDFNMTTNHSFMCLIKYGHLRVNQTFNWNTTKQEHFPDN

SEQ ID NO: 280 - protein, 208 aa, Artificial Sequence
  CD80 v252 ECD
VIHVTKEVKEVATLSCGHNVSVEELAQTRIYWQKDKKMVLTMMSGDINIWPEYKNRTIFDITNNLSIVILALRPSDEGTYECVVLKQEEDAFKREHLAEVTLSVKADFPTPSISDFETPTSNIRRIICSTSGGFPEPHLSWLENGEELNAINTTVSQDPETELYAVSSKLDFNMTTNHSFMCLIKYGHLRVNQTFNWNTTKQEHFPDN

SEQ ID NO: 281 - protein, 208 aa, Artificial Sequence
  CD80 v253 ECD
VIHVTKEVKEVATLSCGHNVSAEELAQTRIYWQKDKKMVLTMMSGDINIWPEYKNRTIFDITNNLSIVILALRPSDEGTYECVVLKNEKDAFKREHLAEVTLSVKADFPTPSISDFETPTSNIRRIICSTSGGFPEPHLSWLENGEELNAINTTVSQDPETELYAVSSKLDFNMTTNHSFMCLIKYGHLRVNQTFNWNTTKQEHFPDN

SEQ ID NO: 282 - protein, 208 aa, Artificial Sequence
  CD80 v254 ECD
VIHVTKEVKEVATLSCGYNVSVEELEQTRIYWQKDKKMVLTMMSGDLNIWPEYKNRTIFDITNNLSIVILALRPSDEGTYECVVQKYEKGAFKREHLAEVTLSVKADFPTPSISDFETPTSNIRRIICSTSGGFPEPHLSWLENGEELNAINTTVSQDPETELYAVSSKLDFNMTTNHSFMCLIKYGHLRVNQTFNWNTTKQEHFPDN

SEQ ID NO: 283 - protein, 208 aa, Artificial Sequence
  CD80 v255 ECD
VIHVTKEVKEVATLSCGHNVSVEELAQTRIYWQKDKKMVLTMMSGDLNIWPEYKNRTIFDITNNLSIVILGLRPSDEGTYECVVQKYEKDAFKREHLAEVTLSVKADFPTPSISDFETPTSNIRRIICSTSGGFPEPHLSWLENGEELNAINTTVSQDPETELYAVSSKLDFNMTTNHSFMCLIKYGHLRVNQTFNWNTTKQEHFPDN

SEQ ID NO: 284 - protein, 208 aa, Artificial Sequence
  CD80 v256 ECD
VIHVTKEVKEVATLSCGHNVSVEELAQTRIYWQKDKKMVLTMMSGDVNIWPEYKNRTIFDITNNLSIVILGLRPSDEGTYECVVLKYDKDAFKREHLAEVTLSVKADFPTPSISDFETPTSNIRRIICSTSGGFPEPHLSWLENGEELNAINTTVSQDPETELYAVSSKLDFNMTTNHSFMCLIKYGHLRVNQTFNWNTTKQEHFPDN

SEQ ID NO: 285 - protein, 208 aa, Artificial Sequence
  CD80 v257 ECD
VIHVTKEVKEVATLSCGHNVSVEELAQTRIYWQKDKKMVLTMMSGDMNIWPEYKNRTIFDITNNLSIVILGLRPSDEGTYECVVLKYEKDAFKREHLAEVTLSVKADFPTPSISDFETPTSNIRRIICSTSGGFPEPHLSWLENGEELNAINTTVSQDPETELYAVSSKLDFNMTTNHSFMCLIKYGHLRVNQTFNWNTTKQEHFPDN

SEQ ID NO: 286 - protein, 208 aa, Artificial Sequence
  CD80 v258 ECD
VIHVTKEVKEVATLSCGHNVSVEELAQTRIYWQKDKKMVLTMMSGDVNIWPEYKNRTIFDITNNLSIVILGLRPSDEGTYECVVLKYEKDAFKREHLAEVTLSVKADFPTPSISDFETPTSNIRRIICSTSGGFPEPHLSWLENGEELNAINTTVSQDPETELYAVSSKLDFNMTTNHSFMCLIKYGHLRVNQTFNWNTTKQEHFPDN

SEQ ID NO: 287 - protein, 208 aa, Artificial Sequence
  CD80 v259 ECD
VIHVTKEVKEVATLSCGHNVSVEELAQTRVYWQKDKKMVLTMMSGDVNIWPEYKNRTIFDITNNLSIVILGLRPSDEGTYECVVLKYEKDVFKREHLAEVTLSVKADFPTPSISDFETPTSNIRRIICSTSGGFPEPHLSWLENGEELNAINTTVSQDPETELYAVSSKLDFNMTTNHSFMCLIKYGHLRVNQTFNWNTTKQEHFPDN

SEQ ID NO: 288 - protein, 208 aa, Artificial Sequence
  CD80 v260 ECD
VIHVTKEVKEVATLSCGHNVSVEELAQTRVCWQKDKKMVLTMMSGDVNIWPEYKNRTIFDITNNLSIVILGLRPSDEGTYECVVMKYEKDAFKREHLAEVTLSVKADFPTPSISDFETPTSNIRRIICSTSGGFPEPHLSWLENGEELNAINTTVSQDPETELYAVSSKLDFNMTTNHSFMCLIKYGHLRVNQTFNWNTTKQEHFPDN

SEQ ID NO: 289 - protein, 208 aa, Artificial Sequence
  CD80 v261 ECD
VIHVTKEVKEVATLSCGHNVSDEELAQTRIYWQKDKKMVLTMMSGDLNIWPEYKNRTIFDITNNLSIVILALRPSDEGTYECVVQKYEKDAFKREHLAEVTLSVKADFPTPSISDFETPTSNIRRIICSTSGGFPEPHLSWLENGEELNAINTTVSQDPETELYAVSSKLDFNMTTNHSFMCLIKYGHLRVNQTFNWNTTKQEHFPDN

SEQ ID NO: 290 - protein, 208 aa, Artificial Sequence
  CD80 v262 ECD
VIHVTKEVKEVATLSCGYNVSVEELAQTRIYWQKDKKMVLTMMSGDMKIWPEYKNRTIFDITNNLSIVILALRPSDEGTYECVVLKYEKDAFKREHLAEVTLSVKADFPTPSISDFETPTSNIRRIICSTSGGFPEPHLSWLENGEELNAINTTVSQDPETELYAVSSKLDFNMTTNHSFMCLIKYGHLRVNQTFNWNTTKQEHFPDN

SEQ ID NO: 291 - protein, 208 aa, Artificial Sequence
  CD80 v263 ECD
VIHVTKEVKEVATLSCGHNVSVEELAQTRIYWQKDKKMVLSMMSGDVNIWPEYKNRTIFDITNNLSIVILGLRPSDEGTYECVVLKYENDAFKREHLAEVTLSVKADFPTPSISDFETPTSNIRRIICSTSGGFPEPHLSWLENGEELNAINTTVSQDPETELYAVSSKLDFNMTTNHSFMCLIKYGHLRVNQTFNWNTTKQEHFPDN

SEQ ID NO: 292 - protein, 208 aa, Artificial Sequence
  CD80 v264 ECD
VIHVTKEVKEVATLSCGHNVSVEELAQTRIYWQKDKKMVLTMMSGDVTIWPEYKNRTIFDITNNLSIVILALRPSDEGTYECVVQKYEKDAFKREHLAEVTLSVKADFPTPSISDFETPTSNIRRIICSTSGGFPEPHLSWLENGEELNAINTTVSQDPETELYAVSSKLDFNMTTNHSFMCLIKYGHLRVNQTFNWNTTKQEHFPDN

SEQ ID NO: 293 - protein, 208 aa, Artificial Sequence
  CD80 v265 ECD
VIHVTKEVKEVATLSCGHNVSVEELAQTRIYWQKDKKMVLTMMSGEVNIWPEYKNRTIFDITNNLSIVILDLRPSDEGTYECVVLKYEKGAFKREHLAEVTLSVKADFPTPSISDFETPTSNIRRIICSTSGGFPEPHLSWLENGEELNAINTTVSQDPETELYAVSSKLDFNMTTNHSFMCLIKYGHLRVNQTFNWNTTKQEHFPDN

SEQ ID NO: 294 - protein, 208 aa, Artificial Sequence
  CD80 v266 ECD
VIHVTKEVKEVATLSCGHNVSVEELAQTRIYWQKDKKMVLTMMSGEVNIWPEYKNRTIFDITNNLSIVILDLRPSDEGTYECVVLKYEKDAFKREHLAEVTLSVKADFPTPSISDFETPTSNIRRIICSTSGGFPEPHLSWLENGEELNAINTTVSQDPETELYAVSSKLDFNMTTNHSFMCLIKYGHLRVNQTFNWNTTKQEHFPDN

SEQ ID NO: 295 - protein, 208 aa, Artificial Sequence
  CD80 v267 ECD
VIHVTKEVKEVATLSCGHNVSVEELAQTRIYWQKDKKMVLSMISGDMNIWPEYKNRTIFDITNNLSIVILGLRPSDEGTYECVVLKYEKGAFKREHLAEVTLSVKADFPTPSISDFETPTSNIRRIICSTSGGFPEPHLSWLENGEELNAINTTVSQDPETELYAVSSKLDFNMTTNHSFMCLIKYGHLRVNQTFNWNTTKQEHFPDN

SEQ ID NO: 296 - protein, 208 aa, Artificial Sequence
  CD80 v268 ECD
VIHVTKEVKEVATLSCGHNVSVEELAQTRIYWQKDKKMVLSMISGDVNIWPEYKNRTIFDITNNLSIVILGLRPSDEGTYECVVLKYEKDAFKREHLAEVTLSVKADFPTPSISDFETPTSNIRRIICSTSGGFPEPHLSWLENGEELNAINTTVSQDPETELYAVSSKLDFNMTTNHSFMCLIKYGHLRVNQTFNWNTTKQEHFPDN

SEQ ID NO: 297 - protein, 208 aa, Artificial Sequence
  CD80 v269 ECD
VIHVTKEVKEVATLSCGHNVSVEELAQTRIYWQKDKKMVLSMISGDLNIWPEYKNRTIFDITNNLSIVILGLRPSDEGTYECVVLKYEKDAFKREHLAEVTLSVKADFPTPSISDFETPTSNIRRIICSTSGGFPEPHLSWLENGEELNAINTTVSQDPETELYAVSSKLDFNMTTNHSFMCLIKYGHLRVNQTFNWNTTKQEHFPDN

SEQ ID NO: 298 - protein, 208 aa, Artificial Sequence
  CD80 v270 ECD
VIHVTKEVKEVATLSCGYNVSAEELAQTRIYWQKDKKMVLTMMSGDVNIWPEYKNRTIFDISNNLSIVILGLRPSDEGTYECVVLKYEKDAFKREHLAEVTLSVKADFPTPSISDFETPTSNIRRIICSTSGGFPEPHLSWLENGEELNAINTTVSQDPETELYAVSSKLDFNMTTNHSFMCLIKYGHLRVNQTFNWNTTKQEHFPDN

SEQ ID NO: 299 - protein, 208 aa, Artificial Sequence
  CD80 v271 ECD
VIHVTKEVKEVATLSCGYNVSVEELEQTRIYWQKDKKMVLTMMSGDLNIWPEYKNRTIFDITNNLSIMILGLRPSDEGTYECVVLKYEKGAFKREHLAEVTLSVKADFPTPSISDFETPTSNIRRIICSTSGGFPEPHLSWLENGEELNAINTTVSQDPETELYAVSSKLDFNMTTNHSFMCLIKYGHLRVNQTFNWNTTKQEHFPDN

SEQ ID NO: 300 - protein, 208 aa, Artificial Sequence
  CD80 v272 ECD
VIHVTKEVKEVATLSCGHNVSVEELAQTRIYWQKDKEMVLTMMSGDVDIWPEYKNRTIFDITNNLSIVILALRPSDEGTYECVVQKYEKNAFKREHLAEVTLSVKADFPTPSISDFETPTSNIRRIICSTSGGFPEPHLSWLENGEELNAINTTVSQDPETELYAVSSKLDFNMTTNHSFMCLIKYGHLRVNQTFNWNTTKQEHFPDN

SEQ ID NO: 301 - protein, 208 aa, Artificial Sequence
  CD80 v273 ECD
VIHVTKEVKEVATLSCGHNVSVEELAHTRIYWQKDKKMVLTMMSGVLNIWPEYKNRTIFDITNNLSIVILGLRPSDEGTYECVVLKYEKDAFKREHLAEVTLSVKADFPTPSISDFETPTSNIRRIICSTSGGFPEPHLSWLENGEELNAINTTVSQDPETELYAVSSKLDFNMTTNHSFMCLIKYGHLRVNQTFNWNTTKQEHFPDN

SEQ ID NO: 302 - protein, 208 aa, Artificial Sequence
  CD80 v274 ECD
VIHVTKEVKEVATLSCGHNVSLEELAHTRIYWQKDKKMVLTMMSGDINIWPEYKNRTIFDITNNLSIVILGLRPSDEGTYECVVLKYEKDAFKREHLAEVTLSVKADFPTPSISDFETPTSNIRRIICSTSGGFPEPHLSWLENGEELNAINTTVSQDPETELYAVSSKLDFNMTTNHSFMCLIKYGHLRVNQTFNWNTTKQEHFPDN

SEQ ID NO: 303 - protein, 208 aa, Artificial Sequence
  CD80 v275 ECD
VIHVTKEVKEVATLSCGHNVSVEELAQTRIYWQKDKKMVLTMMSGVLNIWPEYKNRTIFDITNNLSIMILALRPSDEGTYECVVQKYDKDAFKREHLAEVTLSVKADFPTPSISDFETPTSNIRRIICSTSGGFPEPHLSWLENGEELNAINTTVSQDPETELYAVSSKLDFNMTTNHSFMCLIKYGHLRVNQTFNWNTTKQEHFPDN

SEQ ID NO: 304 - protein, 208 aa, Artificial Sequence
  CD80 v276 ECD
VIHVTKEVKEVATLSCGHNVSVEELAQTRIYWQKDKKMVLSMVSGDINIWPEYKNRTIFDITNNLSIVIMGLRPSDEGTYECVVLKYEKDAFKREHLAEVTLSVKADFPTPSISDFETPTSNIRRIICSTSGGFPEPHLSWLENGEELNAINTTVSQDPETELYAVSSKLDFNMTTNHSFMCLIKYGHLRVNQTFNWNTTKQEHFPDN

SEQ ID NO: 305 - protein, 208 aa, Artificial Sequence
  CD80 v277 ECD
VIHVTKEVKEVATLSCGHNVSVEELAQTRIYWQKDKKMVLTMMSGEVNIWPEYKNRTIFDITDNLSIVILALRPSDEGTYECVVQKYEKDAFKREHLAEVTLSVKADFPTPSISDFETPTSNIRRIICSTSGGFPEPHLSWLENGEELNAINTTVSQDPETELYAVSSKLDFNMTTNHSFMCLIKYGHLRVNQTFNWNTTKQEHFPDN

SEQ ID NO: 306 - protein, 208 aa, Artificial Sequence
  CD80 v278 ECD
VIHVTKEVKEVATLSCGHNVSVEELAQTRIYWQKDKKMVLTMMSGDVNIWPEYKNRTIFDIANNLSIVILDLRPSDEGTYECVVLKYEKDAFEREHLAEVTLSVKADFPTPSISDFETPTSNIRRIICSTSGGFPEPHLSWLENGEELNAINTTVSQDPETELYAVSSKLDFNMTTNHSFMCLIKYGHLRVNQTFNWNTTKQEHFPDN

SEQ ID NO: 307 - protein, 208 aa, Artificial Sequence
  CD80 v279 ECD
VIHVTKEVKEVATLSCGHNVSVEELAQTRIYWQKDKKMVLTMMSGEVNIWPEYKNRTIFDITNNLSIMILALRPSDEGTYECVVLKYEKGAFEREHLAEVTLSVKADFPTPSISDFETPTSNIRRIICSTSGGFPEPHLSWLENGEELNAINTTVSQDPETELYAVSSKLDFNMTTNHSFMCLIKYGHLRVNQTFNWNTTKQEHFPDN

SEQ ID NO: 308 - protein, 208 aa, Artificial Sequence
  CD80 v280 ECD
VIHVTKEVKEVATLSCGHNVSVEELAQTRIYWQKDKKMVLTMISGDVNIWPEYKNRTIFDITNNLSIVILALRPSDEGTYECVVLKYENDAFKREHLAEVTLSVKADFPTPSISDFETPTSNIRRIICSTSGGFPEPHLSWLENGEELNAINTTVSQDPETELYAVSSKLDFNMTTNHSFMCLIKYGHLRVNQTFNWNTTKQEHFPDN

SEQ ID NO: 309 - protein, 208 aa, Artificial Sequence
  CD80 v281 ECD
VIHVTKEVKEVATLSCGHNVSVEELAQTRIYWQKDKKMVLTMMSGDLNIWPEYKNRTIFDITNNLSIVILGLRPSDEGTYECVVMKYEKDAYKREHLAEVTLSVKADFPTPSISDFETPTSNIRRIICSTSGGFPEPHLSWLENGEELNAINTTVSQDPETELYAVSSKLDFNMTTNHSFMCLIKYGHLRVNQTFNWNTTKQEHFPDN

SEQ ID NO: 310 - protein, 208 aa, Artificial Sequence
  CD80 v282 ECD
VIHVTKEVKEVATLSCGHNVSVEELAQTRIYWQKDKKMVLTVMSGDVNIWPDYKNRTIFDITNNLSIVILALRPSDEGTYECVVQKYEKDAFKREHLAEVTLSVKADFPTPSISDFETPTSNIRRIICSTSGGFPEPHLSWLENGEELNAINTTVSQDPETELYAVSSKLDFNMTTNHSFMCLIKYGHLRVNQTFNWNTTKQEHFPDN

SEQ ID NO: 311 - protein, 208 aa, Artificial Sequence
  CD80 v283 ECD
VIHVTKEVKEVATLSCGHNVSDEELAQTRIYWQKDKKMVLTMMSGDLNIWPEYKNRTIFDITNNLSIVIMALRPSDEGTYECVVLKYEKDAFKREHQAEVTLSVKADFPTPSISDFETPTSNIRRIICSTSGGFPEPHLSWLENGEELNAINTTVSQDPETELYAVSSKLDFNMTTNHSFMCLIKYGHLRVNQTFNWNTTKQEHFPDN

SEQ ID NO: 312 - protein, 208 aa, Artificial Sequence
  CD80 v284 ECD
VIHVTKEVKEVATLSCGHNVSVEELAQTRIYWQKDKKMVLSMMSGDVNIWPEYKNRTIFDITNNLSIVILALRPSDEGTYECVVLKYEKDAFKREHQAEVTLSVKADFPTPSISDFETPTSNIRRIICSTSGGFPEPHLSWLENGEELNAINTTVSQDPETELYAVSSKLDFNMTTNHSFMCLIKYGHLRVNQTFNWNTTKQEHFPDN

SEQ ID NO: 313 - protein, 208 aa, Artificial Sequence
  CD80 v285 ECD
VIHVTKEVKEVATLSCGHNVSVEELAQTRIYWQKDKKMVLTMMSGDMNIWPEHKNRTIFDITNNLSIVILGLRPSDEGTYECVVLKYEKGAFKREHRAEVTLSVKADFPTPSISDFETPTSNIRRIICSTSGGFPEPHLSWLENGEELNAINTTVSQDPETELYAVSSKLDFNMTTNHSFMCLIKYGHLRVNQTFNWNTTKQEHFPDN

SEQ ID NO: 314 - protein, 208 aa, Artificial Sequence
  CD80 v286 ECD
VIHVTKEVKEVATLSCGHNVSVEELAQTRIYWQKDKKMVLTMMSGDMNIWPEYKNRTIFDITNNLSIVILDVHPSDEGTYKCVVLKYEKDAFKREHLAEVTLSVKADFPTPSISDFETPTSNIRRIICSTSGGFPEPHLSWLENGEELNAINTTVSQDPETELYAVSSKLDFNMTTNHSFMCLIKYGHLRVNQTFNWNTTKQEHFPDN

SEQ ID NO: 315 - protein, 208 aa, Artificial Sequence
  CD80 v287 ECD
VIHVTKEVKEVATLSCGHNVSVEELAQTRIYWLKDKKMVLTMISGDMNIWPEFKNRTIFDISNNLSIVILALRPSDEGTYECVVQKYEKDAFKREHLAEVTLSVKADFPTPSISDFETPTSNIRRIICSTSGGFPEPHLSWLENGEELNAINTTVSQDPETELYAVSSKLDFNMTTNHSFMCLIKYGHLRVNQTFNWNTTKQEHFPDN

SEQ ID NO: 316 - protein, 208 aa, Artificial Sequence
  CD80 v288 ECD
VIHVTKEVKEVATLSCGHNVSVEELAQTRIYWQKDKKTVLTMMSGEVSIWPEYKNRTIFDITNNLSIVILALRPSDEGTYECVVLKYEKDAFKREHLAEVTLSVKADFPTPSISDFETPTSNIRRIICSTSGGFPEPHLSWLENGEELNAINTTVSQDPETELYAVSSKLDFNMTTNHSFMCLIKYGHLRVNQTFNWNTTKQEHFPDN

SEQ ID NO: 317 - protein, 208 aa, Artificial Sequence
  CD80 v289 ECD
VIHVTKEVKEVATLSCGHNVSVEELAQTRIYWRKDKKMVLTMMSGDVKIWPEYKNRTIFDITNNLSIVILALRPSDEGTYECVVMKYEKDALKREHLAEVTLSVKADFPTPSISDFETPTSNIRRIICSTSGGFPEPHLSWLENGEELNAINTTVSQDPETELYAVSSKLDFNMTTNHSFMCLIKYGHLRVNQTFNWNTTKQEHFPDN

SEQ ID NO: 318 - protein, 208 aa, Artificial Sequence
  CD80 v290 ECD
VIHVTKEVKEVATLSCGHNVSVEELAQTRIYWQKDKKTVLTMVSGDVRIWPEYKNRTIFDITNNLSIVILALRPSDEGTYECVVQKYEKDAFKREHLAEVTLSVKADFPTPSISDFETPTSNIRRIICSTSGGFPEPHLSWLENGEELNAINTTVSQDPETELYAVSSKLDFNMTTNHSFMCLIKYGHLRVNQTFNWNTTKQEHFPDN

SEQ ID NO: 319 - protein, 208 aa, Artificial Sequence
  CD80 v291 ECD
VIHVTKEVKEVATLSCGHNVSVEELAQYRIYWHKDKKMVLTMMSGVINIWPEYKNRTIFDITNNLSIVILGLRPSDEGTYECVVLKYEKDAFKREHLAEVTLSVKADFPTPSISDFETPTSNIRRIICSTSGGFPEPHLSWLENGEELNAINTTVSQDPETELYAVSSKLDFNMTTNHSFMCLIKYGHLRVNQTFNWNTTKQEHFPDN

SEQ ID NO: 320 - protein, 101 aa, Artificial Sequence
  CD80 v196 IgV
VIHVTKEVKEVATLSCGHNVSVEELEQTRIYWRKDKKMVLTMMSGDLNIWPEYKNRTIFDITNNLSIVILALRPSDEGTYECVVQEYEKDAFKREHLAEVT

SEQ ID NO: 321 - protein, 101 aa, Artificial Sequence
  CD80 v197 IgV
VIHVTKEVKEVATLSCGHNVSVEELEQTRIYWRKDKKMVLTMMSGDLNIWPEYKNRTIFDITNNLSIVILALRPSDEGTYECVVQKYEKDAFKREHLAEVT

SEQ ID NO: 322 - protein, 101 aa, Artificial Sequence
  CD80 v198 IgV
VIHVTKEVKEVATLSCGHNVSVEELAQTRIYWQKDKKMVLTMMSGDLNIWPEYKNRTIFDITNNLSIVILALRPSDEGTYECVVQKYEKDAFKREHLAEVT

SEQ ID NO: 323 - protein, 101 aa, Artificial Sequence
  CD80 v199 IgV
VIHVTKEVKEVATLSCGHNVSVEELEQTRIYWLKDKKMVLTMMSGDLNIWPEYKNRTIFDITNNLSIVILALRPSDEGTYECVVQKYEKDAFKREHLAEVT

SEQ ID NO: 324 - protein, 101 aa, Artificial Sequence
  CD80 v200 IgV
VIHVTKEVKEVATLSCGHNVSVEELEQTRIYWLKDKKMVLTMMSGDLNIWPEYKNRTIFDITNNLSIVILALRPSDEGTYECVVLKYEKDAFKREHLAEVT

SEQ ID NO: 325 - protein, 101 aa, Artificial Sequence
  CD80 v201 IgV
VIHVTKEVKEVATLSCGYNVSVEELEQTRIYWLKDKKMVLTMMSGDLNIWPEYKNRTIFDITNNLSIVILALRPSDEGTYECVVQKYEKDAFKREHLAEVT

SEQ ID NO: 326 - protein, 101 aa, Artificial Sequence
  CD80 v202 IgV
VIHVTKEVKEVATLSCGHNVSVEELAQTRIYWLKDKKMVLTMMSGDINIWPEYKNRTIFDITNNLSIVILALRPSDEGTYECVVLKYEKDAFKREHLAEVT

SEQ ID NO: 327 - protein, 101 aa, Artificial Sequence
  CD80 v203 IgV
VIHVTKEVKEVATLSCGYNVSVEELAQTRIYWLKDKKMVLTMMSGDINIWPEYKNRTIFDITNNLSIVILALRPSDEGTYECVVLKYEKDAFKREHLAEVT

SEQ ID NO: 328 - protein, 101 aa, Artificial Sequence
  CD80 v204 IgV
VIHVTKEVKEVATLSCGHNVSVEELAQTRIYWLKDKKMVLTMMSGEINIWPEYKNRTIFDITNNLSIVILALRPSDEGTYECVVLKYEKDAFKREHLAEVT

SEQ ID NO: 329 - protein, 101 aa, Artificial Sequence
  CD80 v205 IgV
VIHVTKEVKEVATLSCGHNVSVEELAQTRIYWRKDKKMVLTMMSGEINIWPEYKNRTIFDITNNLSIVILALRPSDEGTYECVVLKYEKDAFKREHLAEVT

SEQ ID NO: 330 - protein, 101 aa, Artificial Sequence
  CD80 v206 IgV
VIHVTKEVKEVATLSCGYNVSVEELAQTRIYWQKDKKMVLTMMSGDLNIWPEYKNRTIFDITNNLSIVILALRPSDEGTYECVVLKYEKDAFKREHLAEVT

SEQ ID NO: 331 - protein, 101 aa, Artificial Sequence
  CD80 v207 IgV
VIHVTKEVKEVATLSCGHNVSVEELAQTRIYWLKDKKMVLTMMSGDVNIWPEYKNRTIFDITNNLSIVILALRPSDEGTYECVVLKYEKDAFKREHLAEVT

SEQ ID NO: 332 - protein, 101 aa, Artificial Sequence
  CD80 v208 IgV
VIHVTKEVKEVATLSCGHNVSVEELAQTRIYWLKDKKMVLTMMSGDVNIWPEYKNRTIFDITNNLSIVILALRPSDEGAYECVVLKYEKDAFKREHLAEVT

SEQ ID NO: 333 - protein, 101 aa, Artificial Sequence
  CD80 v209 IgV
VIHVTKEVKEVATLSCGHNVSVEELAQTRIYWLKDKKMVLSMMSGDVNIWPEYKNRTIFDITNNLSIVILALRPSDEGTYECVVLKYEKDAFKREHLAEVT

SEQ ID NO: 334 - protein, 101 aa, Artificial Sequence
  CD80 v210 IgV
VIHVTKEVKEVATLSCGHNVSVEELAQTRIYWLKDKKMVLTMMSGDINIWPEYKNRTIFDITNNLSIVILALRPSDEGTYECVVQKYEKDAFKREHLAEVT

SEQ ID NO: 335 - protein, 101 aa, Artificial Sequence
  CD80 v211 IgV
VIHVTKEVKEVATLSCGHNVSVEELAQTRIYWLKDKKMVLTMMSGDINIWPEYKNRTIFDINNNLSIVILALRPSDEGTYECVVQKYEKDAFKREHLAEVT

SEQ ID NO: 336 - protein, 101 aa, Artificial Sequence
  CD80 v212 IgV
VIHVTKEVKEVATLSCGHNVSVEELAQTRIYWLKDKKMVLTMMSGDVNIWPEYKNRTIFDITNNLSIVILALRPSDEGTYECVVQKYEKDAFKREHLAEVT

SEQ ID NO: 337 - protein, 101 aa, Artificial Sequence
  CD80 v213 IgV
VIHVTKEVKEVATLSCGHNVSVEELEQTRIYWQKDKKMVLTMTSGDLNIWPEYKNRTIFDITNNLSIVILALRPSDEGTYECVVQKYEKDAFKQEHLAEVT

SEQ ID NO: 338 - protein, 101 aa, Artificial Sequence
  CD80 v214 IgV
VIHVTKEVKEVATLSCGHNVSVEELAQTRIYWRKDKEMVLTMMSGDVNIWPEYKNRTIFDITNNLSIVILALRPSDEGTYECVVQKYEKDAFKREHLAEVT

SEQ ID NO: 339 - protein, 101 aa, Artificial Sequence
  CD80 v215 IgV
VIHVTKEVKEVATLSCGHNVSADELAQTRIYWLKDKKMVLTMMSGDVNIWPEYKNRTIFDITNNLSIVILALRPSDEGTYECVVLKYEKDAFKREHLAEVT

SEQ ID NO: 340 - protein, 101 aa, Artificial Sequence
  CD80 v216 IgV
VIHVTKEVKEVATLSCGHNVSVEDLAQTRIYWLKDKKMVLTMMSGDVNIWPEYRNRTIFDITNNLSIVILALRPSDEGTYECVVQKYEKDAFKREHLAEVT

SEQ ID NO: 341 - protein, 101 aa, Artificial Sequence
  CD80 v217 IgV
VIHVTKEVKEVATLPCGHNVSVEELAQTRIYWLKDKKMVLTMMSGDLNIWPEYKNRTIFDITNNLSIVILALRPSDEGTYECVVQKYEKDAFKREHLAEVT

SEQ ID NO: 342 - protein, 101 aa, Artificial Sequence
  CD80 v218 IgV
VIHVTKDVKEVATLSCGHNVSVEELAQTRIYWQKDKKMVLTMMSGDINIWPEYKNRTIFDITNNLSIVILALRPSDEGTYECVVLKYEKDAFKREHQAEVT

SEQ ID NO: 343 - protein, 101 aa, Artificial Sequence
  CD80 v219 IgV
VIHVTKEVKEVATLSCGHNVSVEELAQTRIYWLKDKKMVLSMISGDMNIWPEYKNRTIFDITNNLSIVILALRPSDEGTYECVVLKYEKDAFKREHLAEVT

SEQ ID NO: 344 - protein, 101 aa, Artificial Sequence
  CD80 v220 IgV
VIHVTKEVKEVATLSCGHNVSVEELAQTRIYWQKDKKMVLTMMSGDINIWPEYRNRTIFDITNNLSIVILALRPSDEGTYECVVEKYEKDAFKREHLAEVT

SEQ ID NO: 345 - protein, 101 aa, Artificial Sequence
  CD80 v221 IgV
VIHVTKEVKEVATLSCGHNVSVEELAQTRIYWKKDKKMVLTMMSGVMNIWPEYKNRTIFDITNNLSIVILALRPSDEGTYECVVQKYEKDAFKREHLAEVT

SEQ ID NO: 346 - protein, 101 aa, Artificial Sequence
  CD80 v222 IgV
VIHVTKEVKEVATLSCGHNVSVEELAQTRISWQKDKKMVLTMMSGDLNIWPEYKNRTIFDITNNLSIVILALRPSDEGLYECVVLKYGKDAFKREHLAEVT

SEQ ID NO: 347 - protein, 101 aa, Artificial Sequence
  CD80 v223 IgV
VIHVTKEVKEVATLSCGLNVSAEELAQTRIYWQKDKKMVLTMMSGDLTIWPEYKNRTIFDITNNLSIVILALRPSDEGTYECVVQKYEKDAFKREHLAEVT

SEQ ID NO: 348 - protein, 101 aa, Artificial Sequence
  CD80 v224 IgV
VIHVTKEVKEVATLSCGHNVSVEELAHTRIYWQKDKKMVLTMMSGDLNIWPEYKNRTIFDITNNLSIVILALRPSDEGTYECVVQKYEKDAFKQKHLAEVT

SEQ ID NO: 349 - protein, 101 aa, Artificial Sequence
  CD80 v225 IgV
VIHVTKEVKEVATLSCGHNVSVEELAQTRIYWKKDKKMVLTMMSGDVNIWPEYKNRTIFDITNNLSIVILALRPSDEGTYECVVLKYEEDAFRREHLAEVT

SEQ ID NO: 350 - protein, 101 aa, Artificial Sequence
  CD80 v226 IgV
VIHVTKEVKEVATLSCGHNVSVEELAQTRIYWQKDKKMVLTMMSGDINIWPEYKNRTIFDITNNLSIVILALRPSDAGTYECVVQKYEKDAFKWEHLAEVT

SEQ ID NO: 351 - protein, 101 aa, Artificial Sequence
  CD80 v227 IgV
VIHVTKEVKEVATLSCGHNVSVEELEQTRIYWQKDKKMVLTMISGDLNIWPEYKNRTIFDITNNLSIVILALRPSDEGTYECVVQEYEKDAFKWEHLAEVT

SEQ ID NO: 352 - protein, 101 aa, Artificial Sequence
  CD80 v228 IgV
VIHVTKEVKEVATLSCGHNVSVEELAHTRIYWLKDKKMVLTMMSGDVNIWPEYKDRTIFDITNNLSIVILALRPSDEGTYECVVQKYENDAFKREHLAEVT

SEQ ID NO: 353 - protein, 101 aa, Artificial Sequence
  CD80 v229 IgV
VIHVTKEVKEVATLSCGYNASVEELAQTRIYWLKDKKMVLTMMSGDVNIWPEFKNRTIFDITNNLSIVILALRPSDEGTYECVVLKYEKDAFKREHLAEVT

SEQ ID NO: 354 - protein, 101 aa, Artificial Sequence
  CD80 v230 IgV
VIHVTKEVKEVATLSCGHNVSAEELAQTRIYWQKDKKMVLTMMSGDMNIWPEYKNRTIFDITNNLSIEILDLRPSDEGTYECVVLKYEKDAFKREHLAEVT

SEQ ID NO: 355 - protein, 101 aa, Artificial Sequence
  CD80 v231 IgV
VIHVTKEVKEVATLSCGHNVSVEELAQTRIYWLKDKKMVLTMMSGDLNIWPEYKNRTIFDITNNLSIVILGLRPSDEGTYECVVLKYEKDASKREHLAEVT

SEQ ID NO: 356 - protein, 101 aa, Artificial Sequence
  CD80 v232 IgV
VIHVTKEVKEVATLSCGHNVSAEELAQTHIYWQKDKKMVLTMMSGEINIWPEYKNRTIFDITNNLSIVILALRPSDEGTYECVVLKYEKDAFKREHLAEVT

SEQ ID NO: 357 - protein, 101 aa, Artificial Sequence
  CD80 v233 IgV
VIHVTKEVKEVATLSCGHNVSVEELAQTRIYWLKDKKMVLTMISGDMNIWPEYKNRTIFDITNNLSIVILALRPSDEGTYECVVQKYEKDAFKWEHLAEVT

SEQ ID NO: 358 - protein, 101 aa, Artificial Sequence
  CD80 v234 IgV
VIHVTKEVKEVATLSCGYNVSVEELAQTRIYWQKDKKMVLTMMSGDMNIWPEYKNRTIFDITNNLSIMILALRPSDEGTYECVVLKYEKDAFKREHQAEVT

SEQ ID NO: 359 - protein, 101 aa, Artificial Sequence
  CD80 v235 IgV
VIHVTKEVKEVATLSCGHNVSVEELAQTRIYWLKDKKMVLTMMSGDLNIWPEYKNRTIFDITNNLSIMILALRPSDEGTYECVVQKYDKDAFKREHLAEVT

SEQ ID NO: 360 - protein, 101 aa, Artificial Sequence
  CD80 v236 IgV
VIHVTKEVKEVATLSCGHNVSVEELAQTRIYWLKDKKMVLTMVSGDINIWPEYKNRTIFDITNNLSIVILGLRPSDEGTYECVVLKYEKDAFKREHLAEVT

SEQ ID NO: 361 - protein, 101 aa, Artificial Sequence
  CD80 v237 IgV
VIHVTKEVKEVATLSCGHNVSVEELAQTRIYWQKDKKMVLTMMSGDLNIWPEYKNRTIFDITNNLSIVILGLRPSDEGTYECVVLKYEKDAFKREHQAEVT

SEQ ID NO: 362 - protein, 101 aa, Artificial Sequence
  CD80 v238 IgV
VIHVTKEVKEVATLSCGHNVSVEELAQTRIYWQKDKKMVLTMMSGDVNIWPEYKNRTIFDITNNLSIVILGLRPSDEGTYECVVMKYEKDAFKREHQAEVT

SEQ ID NO: 363 - protein, 101 aa, Artificial Sequence
  CD80 v239 IgV
VIHVTKEVKEVATLSCGYNVSVEELAQTRIHWQKDKKMVLTMMSGDVNIWPEYKNRTIFDITNNLSIVILGLRPSDEGTYECVVQKYEKDAFKREHLAEVT

SEQ ID NO: 364 - protein, 101 aa, Artificial Sequence
  CD80 v240 IgV
VIHVTKEVKEVATLSCGHNVSVEELAQTRIYWQKDKKMVLTMMSGEVNIWPEYKNRTIFDITNNLSIVILALRPSDEGTYECVVLKYEKDAFKREHQAEVT

SEQ ID NO: 365 - protein, 101 aa, Artificial Sequence
  CD80 v241 IgV
VIHVTKEVKEVATLSCGHNVSVEELAQTRIYWQKDKKMVLTMMSGVINIWPEYKNRTIFDITNNLSIVILGLRPSDEGTYECVVLKYEKDAVKREHLAEVT

SEQ ID NO: 366 - protein, 101 aa, Artificial Sequence
  CD80 v242 IgV
VIHVTKEVKEVATLSCGHNVSVEELAQTRIYWQKDKKMVLTMMSGDVNIWPEYKNRTIFDIANNLSIVILGLRPSDEGTYECAVLKHEKDAFKREHMAEVT

SEQ ID NO: 367 - protein, 101 aa, Artificial Sequence
  CD80 v243 IgV
VIHVTKEVKEVATLSCGHNVSVEELAQTRIYWLKDKKMVLTMMSGDMKIWPEYKNRTIFDITNNLSIVILALRPSDEGTYECVVQKYEKDAFKREHQAEVT

SEQ ID NO: 368 - protein, 101 aa, Artificial Sequence
  CD80 v244 IgV
VIHVTKEVKEVATLSCGHNVSVEELAQTRIYWQKDKKMVLTMMSGDMNIWPEYKNRTIFDITNNLSIVILALRPSDEGTYECVVQKYEKDAFTRVHQAEVT

SEQ ID NO: 369 - protein, 101 aa, Artificial Sequence
  CD80 v245 IgV
VIHVTKEVKEVATLSCGHNVSVEELAQTRIYWQKDKKMVLTMMSGDVKIWPEYKNRTIFDITNNLSIMILALRPSDEGTYECVVLKYENDAFKREHLAEVT

SEQ ID NO: 370 - protein, 101 aa, Artificial Sequence
  CD80 v246 IgV
VIHVTKEVKEVATLSCGHNVSVEELAQTRIYWLKDKKMVLTMMSGDIDIWPEYKNRTIFDITNNLSIVILGLRPSDEGTYECVVLKYEKDAFKREHLAEVT

SEQ ID NO: 371 - protein, 101 aa, Artificial Sequence
  CD80 v247 IgV
VIHVTKEVKEVATLSCGHNVSVEELAQTHIYWQKDKKMVLTMVSGDINVWPEYKNRTIFDITNNLSIVILALRPSDEGTYECVVLKYEKDAFKREHLAEVT

SEQ ID NO: 372 - protein, 101 aa, Artificial Sequence
  CD80 v248 IgV
VIHVTKEVKEVATLSCGHNVSVEELAHTRIYWQKDKKMVLTMMSGDINIWPEYKNRTIFDITNNLSIVILALRPSDEGTYECVVQKYEKGAFKREHLAEVT

SEQ ID NO: 373 - protein, 101 aa, Artificial Sequence
  CD80 v249 IgV
VIHVTKEVKEVATLSCGHNVSVEELAQTRIYWQKDKKMVLTMMSGDINIWPEYKNRTIFDITNNLSIVILALRPSDEGTYECVVQKYEKGAFKREHLAEVT

SEQ ID NO: 374 - protein, 101 aa, Artificial Sequence
  CD80 v250 IgV
VIHVTKEVKEVATLSCGHNVSVEELAQTRIYWQKDKKMVLTMMSGDINIWPEYKNRTIFDISNNLSIVILALRPSDEGTYECVVQKYEKDAFKREHLAEVT

SEQ ID NO: 375 - protein, 101 aa, Artificial Sequence
  CD80 v251 IgV
VIHVTKEVKEVATLSCGHNVSVEELEQTRIYWQKDKKMVLTMMSGDLNIWPEYKNRTIFDITNNLSIVILGLRPSDEGTYECVVLKYEKDAFKREHLAEVT

SEQ ID NO: 376 - protein, 101 aa, Artificial Sequence
  CD80 v252 IgV
VIHVTKEVKEVATLSCGHNVSVEELAQTRIYWQKDKKMVLTMMSGDINIWPEYKNRTIFDITNNLSIVILALRPSDEGTYECVVLKQEEDAFKREHLAEVT

SEQ ID NO: 377 - protein, 101 aa, Artificial Sequence
  CD80 v253 IgV
VIHVTKEVKEVATLSCGHNVSAEELAQTRIYWQKDKKMVLTMMSGDINIWPEYKNRTIFDITNNLSIVILALRPSDEGTYECVVLKNEKDAFKREHLAEVT

SEQ ID NO: 378 - protein, 101 aa, Artificial Sequence
  CD80 v254 IgV
VIHVTKEVKEVATLSCGYNVSVEELEQTRIYWQKDKKMVLTMMSGDLNIWPEYKNRTIFDITNNLSIVILALRPSDEGTYECVVQKYEKGAFKREHLAEVT

SEQ ID NO: 379 - protein, 101 aa, Artificial Sequence
  CD80 v255 IgV
VIHVTKEVKEVATLSCGHNVSVEELAQTRIYWQKDKKMVLTMMSGDLNIWPEYKNRTIFDITNNLSIVILGLRPSDEGTYECVVQKYEKDAFKREHLAEVT

SEQ ID NO: 380 - protein, 101 aa, Artificial Sequence
  CD80 v256 IgV
VIHVTKEVKEVATLSCGHNVSVEELAQTRIYWQKDKKMVLTMMSGDVNIWPEYKNRTIFDITNNLSIVILGLRPSDEGTYECVVLKYDKDAFKREHLAEVT

SEQ ID NO: 381 - protein, 101 aa, Artificial Sequence
  CD80 v257 IgV
VIHVTKEVKEVATLSCGHNVSVEELAQTRIYWQKDKKMVLTMMSGDMNIWPEYKNRTIFDITNNLSIVILGLRPSDEGTYECVVLKYEKDAFKREHLAEVT

SEQ ID NO: 382 - protein, 101 aa, Artificial Sequence
  CD80 v258 IgV
VIHVTKEVKEVATLSCGHNVSVEELAQTRIYWQKDKKMVLTMMSGDVNIWPEYKNRTIFDITNNLSIVILGLRPSDEGTYECVVLKYEKDAFKREHLAEVT

SEQ ID NO: 383 - protein, 101 aa, Artificial Sequence
  CD80 v259 IgV
VIHVTKEVKEVATLSCGHNVSVEELAQTRVYWQKDKKMVLTMMSGDVNIWPEYKNRTIFDITNNLSIVILGLRPSDEGTYECVVLKYEKDVFKREHLAEVT

SEQ ID NO: 384 - protein, 101 aa, Artificial Sequence
  CD80 v260 IgV
VIHVTKEVKEVATLSCGHNVSVEELAQTRVCWQKDKKMVLTMMSGDVNIWPEYKNRTIFDITNNLSIVILGLRPSDEGTYECVVMKYEKDAFKREHLAEVT

SEQ ID NO: 385 - protein, 101 aa, Artificial Sequence
  CD80 v261 IgV
VIHVTKEVKEVATLSCGHNVSDEELAQTRIYWQKDKKMVLTMMSGDLNIWPEYKNRTIFDITNNLSIVILALRPSDEGTYECVVQKYEKDAFKREHLAEVT

SEQ ID NO: 386 - protein, 101 aa, Artificial Sequence
  CD80 v262 IgV
VIHVTKEVKEVATLSCGYNVSVEELAQTRIYWQKDKKMVLTMMSGDMKIWPEYKNRTIFDITNNLSIVILALRPSDEGTYECVVLKYEKDAFKREHLAEVT

SEQ ID NO: 387 - protein, 101 aa, Artificial Sequence
  CD80 v263 IgV
VIHVTKEVKEVATLSCGHNVSVEELAQTRIYWQKDKKMVLSMMSGDVNIWPEYKNRTIFDITNNLSIVILGLRPSDEGTYECVVLKYENDAFKREHLAEVT

SEQ ID NO: 388 - protein, 101 aa, Artificial Sequence
  CD80 v264 IgV
VIHVTKEVKEVATLSCGHNVSVEELAQTRIYWQKDKKMVLTMMSGDVTIWPEYKNRTIFDITNNLSIVILALRPSDEGTYECVVQKYEKDAFKREHLAEVT

SEQ ID NO: 389 - protein, 101 aa, Artificial Sequence
  CD80 v265 IgV
VIHVTKEVKEVATLSCGHNVSVEELAQTRIYWQKDKKMVLTMMSGEVNIWPEYKNRTIFDITNNLSIVILDLRPSDEGTYECVVLKYEKGAFKREHLAEVT

SEQ ID NO: 390 - protein, 101 aa, Artificial Sequence
  CD80 v266 IgV
VIHVTKEVKEVATLSCGHNVSVEELAQTRIYWQKDKKMVLTMMSGEVNIWPEYKNRTIFDITNNLSIVILDLRPSDEGTYECVVLKYEKDAFKREHLAEVT

SEQ ID NO: 391 - protein, 101 aa, Artificial Sequence
  CD80 v267 IgV
VIHVTKEVKEVATLSCGHNVSVEELAQTRIYWQKDKKMVLSMISGDMNIWPEYKNRTIFDITNNLSIVILGLRPSDEGTYECVVLKYEKGAFKREHLAEVT

SEQ ID NO: 392 - protein, 101 aa, Artificial Sequence
  CD80 v268 IgV
VIHVTKEVKEVATLSCGHNVSVEELAQTRIYWQKDKKMVLSMISGDVNIWPEYKNRTIFDITNNLSIVILGLRPSDEGTYECVVLKYEKDAFKREHLAEVT

SEQ ID NO: 393 - protein, 101 aa, Artificial Sequence
  CD80 v269 IgV
VIHVTKEVKEVATLSCGHNVSVEELAQTRIYWQKDKKMVLSMISGDLNIWPEYKNRTIFDITNNLSIVILGLRPSDEGTYECVVLKYEKDAFKREHLAEVT

SEQ ID NO: 394 - protein, 101 aa, Artificial Sequence
  CD80 v270 IgV
VIHVTKEVKEVATLSCGYNVSAEELAQTRIYWQKDKKMVLTMMSGDVNIWPEYKNRTIFDISNNLSIVILGLRPSDEGTYECVVLKYEKDAFKREHLAEVT

SEQ ID NO: 395 - protein, 101 aa, Artificial Sequence
  CD80 v271 IgV
VIHVTKEVKEVATLSCGYNVSVEELEQTRIYWQKDKKMVLTMMSGDLNIWPEYKNRTIFDITNNLSIMILGLRPSDEGTYECVVLKYEKGAFKREHLAEVT

SEQ ID NO: 396 - protein, 101 aa, Artificial Sequence
  CD80 v272 IgV
VIHVTKEVKEVATLSCGHNVSVEELAQTRIYWQKDKEMVLTMMSGDVDIWPEYKNRTIFDITNNLSIVILALRPSDEGTYECVVQKYEKNAFKREHLAEVT

SEQ ID NO: 397 - protein, 101 aa, Artificial Sequence
  CD80 v273 IgV
VIHVTKEVKEVATLSCGHNVSVEELAHTRIYWQKDKKMVLTMMSGVLNIWPEYKNRTIFDITNNLSIVILGLRPSDEGTYECVVLKYEKDAFKREHLAEVT

SEQ ID NO: 398 - protein, 101 aa, Artificial Sequence
  CD80 v274 IgV
VIHVTKEVKEVATLSCGHNVSLEELAHTRIYWQKDKKMVLTMMSGDINIWPEYKNRTIFDITNNLSIVILGLRPSDEGTYECVVLKYEKDAFKREHLAEVT

SEQ ID NO: 399 - protein, 101 aa, Artificial Sequence
  CD80 v275 IgV
VIHVTKEVKEVATLSCGHNVSVEELAQTRIYWQKDKKMVLTMMSGVLNIWPEYKNRTIFDITNNLSIMILALRPSDEGTYECVVQKYDKDAFKREHLAEVT

SEQ ID NO: 400 - protein, 101 aa, Artificial Sequence
  CD80 v276 IgV
VIHVTKEVKEVATLSCGHNVSVEELAQTRIYWQKDKKMVLSMVSGDINIWPEYKNRTIFDITNNLSIVIMGLRPSDEGTYECVVLKYEKDAFKREHLAEVT

SEQ ID NO: 401 - protein, 101 aa, Artificial Sequence
  CD80 v277 IgV
VIHVTKEVKEVATLSCGHNVSVEELAQTRIYWQKDKKMVLTMMSGEVNIWPEYKNRTIFDITDNLSIVILALRPSDEGTYECVVQKYEKDAFKREHLAEVT

SEQ ID NO: 402 - protein, 101 aa, Artificial Sequence
  CD80 v278 IgV
VIHVTKEVKEVATLSCGHNVSVEELAQTRIYWQKDKKMVLTMMSGDVNIWPEYKNRTIFDIANNLSIVILDLRPSDEGTYECVVLKYEKDAFEREHLAEVT

SEQ ID NO: 403 - protein, 101 aa, Artificial Sequence
  CD80 v279 IgV
VIHVTKEVKEVATLSCGHNVSVEELAQTRIYWQKDKKMVLTMMSGEVNIWPEYKNRTIFDITNNLSIMILALRPSDEGTYECVVLKYEKGAFEREHLAEVT

SEQ ID NO: 404 - protein, 101 aa, Artificial Sequence
  CD80 v280 IgV
VIHVTKEVKEVATLSCGHNVSVEELAQTRIYWQKDKKMVLTMISGDVNIWPEYKNRTIFDITNNLSIVILALRPSDEGTYECVVLKYENDAFKREHLAEVT

SEQ ID NO: 405 - protein, 101 aa, Artificial Sequence
  CD80 v281 IgV
VIHVTKEVKEVATLSCGHNVSVEELAQTRIYWQKDKKMVLTMMSGDLNIWPEYKNRTIFDITNNLSIVILGLRPSDEGTYECVVMKYEKDAYKREHLAEVT

SEQ ID NO: 406 - protein, 101 aa, Artificial Sequence
  CD80 v282 IgV
VIHVTKEVKEVATLSCGHNVSVEELAQTRIYWQKDKKMVLTVMSGDVNIWPDYKNRTIFDITNNLSIVILALRPSDEGTYECVVQKYEKDAFKREHLAEVT

SEQ ID NO: 407 - protein, 101 aa, Artificial Sequence
  CD80 v283 IgV
VIHVTKEVKEVATLSCGHNVSDEELAQTRIYWQKDKKMVLTMMSGDLNIWPEYKNRTIFDITNNLSIVIMALRPSDEGTYECVVLKYEKDAFKREHQAEVT

SEQ ID NO: 408 - protein, 101 aa, Artificial Sequence
  CD80 v284 IgV
VIHVTKEVKEVATLSCGHNVSVEELAQTRIYWQKDKKMVLSMMSGDVNIWPEYKNRTIFDITNNLSIVILALRPSDEGTYECVVLKYEKDAFKREHQAEVT

SEQ ID NO: 409 - protein, 101 aa, Artificial Sequence
  CD80 v285 IgV
VIHVTKEVKEVATLSCGHNVSVEELAQTRIYWQKDKKMVLTMMSGDMNIWPEHKNRTIFDITNNLSIVILGLRPSDEGTYECVVLKYEKGAFKREHRAEVT

SEQ ID NO: 410 - protein, 101 aa, Artificial Sequence
  CD80 v286 IgV
VIHVTKEVKEVATLSCGHNVSVEELAQTRIYWQKDKKMVLTMMSGDMNIWPEYKNRTIFDITNNLSIVILDVHPSDEGTYKCVVLKYEKDAFKREHLAEVT

SEQ ID NO: 411 - protein, 101 aa, Artificial Sequence
  CD80 v287 IgV
VIHVTKEVKEVATLSCGHNVSVEELAQTRIYWLKDKKMVLTMISGDMNIWPEFKNRTIFDISNNLSIVILALRPSDEGTYECVVQKYEKDAFKREHLAEVT

SEQ ID NO: 412 - protein, 101 aa, Artificial Sequence
  CD80 v288 IgV
VIHVTKEVKEVATLSCGHNVSVEELAQTRIYWQKDKKTVLTMMSGEVSIWPEYKNRTIFDITNNLSIVILALRPSDEGTYECVVLKYEKDAFKREHLAEVT

SEQ ID NO: 413 - protein, 101 aa, Artificial Sequence
  CD80 v289 IgV
VIHVTKEVKEVATLSCGHNVSVEELAQTRIYWRKDKKMVLTMMSGDVKIWPEYKNRTIFDITNNLSIVILALRPSDEGTYECVVMKYEKDALKREHLAEVT

SEQ ID NO: 414 - protein, 101 aa, Artificial Sequence
  CD80 v290 IgV
VIHVTKEVKEVATLSCGHNVSVEELAQTRIYWQKDKKTVLTMVSGDVRIWPEYKNRTIFDITNNLSIVILALRPSDEGTYECVVQKYEKDAFKREHLAEVT

SEQ ID NO: 415 - protein, 101 aa, Artificial Sequence
  CD80 v291 IgV
VIHVTKEVKEVATLSCGHNVSVEELAQYRIYWHKDKKMVLTMMSGVINIWPEYKNRTIFDITNNLSIVILGLRPSDEGTYECVVLKYEKDAFKREHLAEVT

SEQ ID NO: 416 - protein, 107 aa, Artificial Sequence
  CD80 v196 IgV
VIHVTKEVKEVATLSCGHNVSVEELEQTRIYWRKDKKMVLTMMSGDLNIWPEYKNRTIFDITNNLSIVILALRPSDEGTYECVVQEYEKDAFKREHLAEVTLSVKAD

SEQ ID NO: 417 - protein, 107 aa, Artificial Sequence
  CD80 v197 IgV
VIHVTKEVKEVATLSCGHNVSVEELEQTRIYWRKDKKMVLTMMSGDLNIWPEYKNRTIFDITNNLSIVILALRPSDEGTYECVVQKYEKDAFKREHLAEVTLSVKAD

SEQ ID NO: 418 - protein, 107 aa, Artificial Sequence
  CD80 v198 IgV
VIHVTKEVKEVATLSCGHNVSVEELAQTRIYWQKDKKMVLTMMSGDLNIWPEYKNRTIFDITNNLSIVILALRPSDEGTYECVVQKYEKDAFKREHLAEVTLSVKAD

SEQ ID NO: 419 - protein, 107 aa, Artificial Sequence
  CD80 v199 IgV
VIHVTKEVKEVATLSCGHNVSVEELEQTRIYWLKDKKMVLTMMSGDLNIWPEYKNRTIFDITNNLSIVILALRPSDEGTYECVVQKYEKDAFKREHLAEVTLSVKAD

SEQ ID NO: 420 - protein, 107 aa, Artificial Sequence
  CD80 v200 IgV
VIHVTKEVKEVATLSCGHNVSVEELEQTRIYWLKDKKMVLTMMSGDLNIWPEYKNRTIFDITNNLSIVILALRPSDEGTYECVVLKYEKDAFKREHLAEVTLSVKAD

SEQ ID NO: 421 - protein, 107 aa, Artificial Sequence
  CD80 v201 IgV
VIHVTKEVKEVATLSCGYNVSVEELEQTRIYWLKDKKMVLTMMSGDLNIWPEYKNRTIFDITNNLSIVILALRPSDEGTYECVVQKYEKDAFKREHLAEVTLSVKAD

SEQ ID NO: 422 - protein, 107 aa, Artificial Sequence
  CD80 v202 IgV
VIHVTKEVKEVATLSCGHNVSVEELAQTRIYWLKDKKMVLTMMSGDINIWPEYKNRTIFDITNNLSIVILALRPSDEGTYECVVLKYEKDAFKREHLAEVTLSVKAD

SEQ ID NO: 423 - protein, 107 aa, Artificial Sequence
  CD80 v203 IgV
VIHVTKEVKEVATLSCGYNVSVEELAQTRIYWLKDKKMVLTMMSGDINIWPEYKNRTIFDITNNLSIVILALRPSDEGTYECVVLKYEKDAFKREHLAEVTLSVKAD

SEQ ID NO: 424 - protein, 107 aa, Artificial Sequence
  CD80 v204 IgV
VIHVTKEVKEVATLSCGHNVSVEELAQTRIYWLKDKKMVLTMMSGEINIWPEYKNRTIFDITNNLSIVILALRPSDEGTYECVVLKYEKDAFKREHLAEVTLSVKAD

SEQ ID NO: 425 - protein, 107 aa, Artificial Sequence
  CD80 v205 IgV
VIHVTKEVKEVATLSCGHNVSVEELAQTRIYWRKDKKMVLTMMSGEINIWPEYKNRTIFDITNNLSIVILALRPSDEGTYECVVLKYEKDAFKREHLAEVTLSVKAD

SEQ ID NO: 426 - protein, 107 aa, Artificial Sequence
  CD80 v206 IgV
VIHVTKEVKEVATLSCGYNVSVEELAQTRIYWQKDKKMVLTMMSGDLNIWPEYKNRTIFDITNNLSIVILALRPSDEGTYECVVLKYEKDAFKREHLAEVTLSVKAD

SEQ ID NO: 427 - protein, 107 aa, Artificial Sequence
  CD80 v207 IgV
VIHVTKEVKEVATLSCGHNVSVEELAQTRIYWLKDKKMVLTMMSGDVNIWPEYKNRTIFDITNNLSIVILALRPSDEGTYECVVLKYEKDAFKREHLAEVTLSVKAD

SEQ ID NO: 428 - protein, 107 aa, Artificial Sequence
  CD80 v208 IgV
VIHVTKEVKEVATLSCGHNVSVEELAQTRIYWLKDKKMVLTMMSGDVNIWPEYKNRTIFDITNNLSIVILALRPSDEGAYECVVLKYEKDAFKREHLAEVTLSVKAD

SEQ ID NO: 429 - protein, 107 aa, Artificial Sequence
  CD80 v209 IgV
VIHVTKEVKEVATLSCGHNVSVEELAQTRIYWLKDKKMVLSMMSGDVNIWPEYKNRTIFDITNNLSIVILALRPSDEGTYECVVLKYEKDAFKREHLAEVTLSVKAD

SEQ ID NO: 430 - protein, 107 aa, Artificial Sequence
  CD80 v210 IgV
VIHVTKEVKEVATLSCGHNVSVEELAQTRIYWLKDKKMVLTMMSGDINIWPEYKNRTIFDITNNLSIVILALRPSDEGTYECVVQKYEKDAFKREHLAEVTLSVKAD

SEQ ID NO: 431 - protein, 107 aa, Artificial Sequence
  CD80 v211 IgV
VIHVTKEVKEVATLSCGHNVSVEELAQTRIYWLKDKKMVLTMMSGDINIWPEYKNRTIFDINNNLSIVILALRPSDEGTYECVVQKYEKDAFKREHLAEVTLSVKAD

SEQ ID NO: 432 - protein, 107 aa, Artificial Sequence
  CD80 v212 IgV
VIHVTKEVKEVATLSCGHNVSVEELAQTRIYWLKDKKMVLTMMSGDVNIWPEYKNRTIFDITNNLSIVILALRPSDEGTYECVVQKYEKDAFKREHLAEVTLSVKAD

SEQ ID NO: 433 - protein, 107 aa, Artificial Sequence
  CD80 v213 IgV
VIHVTKEVKEVATLSCGHNVSVEELEQTRIYWQKDKKMVLTMTSGDLNIWPEYKNRTIFDITNNLSIVILALRPSDEGTYECVVQKYEKDAFKQEHLAEVTLSVKAD

SEQ ID NO: 434 - protein, 107 aa, Artificial Sequence
  CD80 v214 IgV
VIHVTKEVKEVATLSCGHNVSVEELAQTRIYWRKDKEMVLTMMSGDVNIWPEYKNRTIFDITNNLSIVILALRPSDEGTYECVVQKYEKDAFKREHLAEVTLSVKAD

SEQ ID NO: 435 - protein, 107 aa, Artificial Sequence
  CD80 v215 IgV
VIHVTKEVKEVATLSCGHNVSADELAQTRIYWLKDKKMVLTMMSGDVNIWPEYKNRTIFDITNNLSIVILALRPSDEGTYECVVLKYEKDAFKREHLAEVTLSVKAD

SEQ ID NO: 436 - protein, 107 aa, Artificial Sequence
  CD80 v216 IgV
VIHVTKEVKEVATLSCGHNVSVEDLAQTRIYWLKDKKMVLTMMSGDVNIWPEYRNRTIFDITNNLSIVILALRPSDEGTYECVVQKYEKDAFKREHLAEVTLSVKAD

SEQ ID NO: 437 - protein, 107 aa, Artificial Sequence
  CD80 v217 IgV
VIHVTKEVKEVATLPCGHNVSVEELAQTRIYWLKDKKMVLTMMSGDLNIWPEYKNRTIFDITNNLSIVILALRPSDEGTYECVVQKYEKDAFKREHLAEVTLSVKAD

SEQ ID NO: 438 - protein, 107 aa, Artificial Sequence
  CD80 v218 IgV
VIHVTKDVKEVATLSCGHNVSVEELAQTRIYWQKDKKMVLTMMSGDINIWPEYKNRTIFDITNNLSIVILALRPSDEGTYECVVLKYEKDAFKREHQAEVTLSVKAD

SEQ ID NO: 439 - protein, 107 aa, Artificial Sequence
  CD80 v219 IgV
VIHVTKEVKEVATLSCGHNVSVEELAQTRIYWLKDKKMVLSMISGDMNIWPEYKNRTIFDITNNLSIVILALRPSDEGTYECVVLKYEKDAFKREHLAEVTLSVKAD

SEQ ID NO: 440 - protein, 107 aa, Artificial Sequence
  CD80 v220 IgV
VIHVTKEVKEVATLSCGHNVSVEELAQTRIYWQKDKKMVLTMMSGDINIWPEYRNRTIFDITNNLSIVILALRPSDEGTYECVVEKYEKDAFKREHLAEVTLSVKAD

SEQ ID NO: 441 - protein, 107 aa, Artificial Sequence
  CD80 v221 IgV
VIHVTKEVKEVATLSCGHNVSVEELAQTRIYWKKDKKMVLTMMSGVMNIWPEYKNRTIFDITNNLSIVILALRPSDEGTYECVVQKYEKDAFKREHLAEVTLSVKAD

SEQ ID NO: 442 - protein, 107 aa, Artificial Sequence
  CD80 v222 IgV
VIHVTKEVKEVATLSCGHNVSVEELAQTRISWQKDKKMVLTMMSGDLNIWPEYKNRTIFDITNNLSIVILALRPSDEGLYECVVLKYGKDAFKREHLAEVTLSVKAD

SEQ ID NO: 443 - protein, 107 aa, Artificial Sequence
  CD80 v223 IgV
VIHVTKEVKEVATLSCGLNVSAEELAQTRIYWQKDKKMVLTMMSGDLTIWPEYKNRTIFDITNNLSIVILALRPSDEGTYECVVQKYEKDAFKREHLAEVTLSVKAD

SEQ ID NO: 444 - protein, 107 aa, Artificial Sequence
  CD80 v224 IgV
VIHVTKEVKEVATLSCGHNVSVEELAHTRIYWQKDKKMVLTMMSGDLNIWPEYKNRTIFDITNNLSIVILALRPSDEGTYECVVQKYEKDAFKQKHLAEVTLSVKAD

SEQ ID NO: 445 - protein, 107 aa, Artificial Sequence
  CD80 v225 IgV
VIHVTKEVKEVATLSCGHNVSVEELAQTRIYWKKDKKMVLTMMSGDVNIWPEYKNRTIFDITNNLSIVILALRPSDEGTYECVVLKYEEDAFRREHLAEVTLSVKAD

SEQ ID NO: 446 - protein, 107 aa, Artificial Sequence
  CD80 v226 IgV
VIHVTKEVKEVATLSCGHNVSVEELAQTRIYWQKDKKMVLTMMSGDINIWPEYKNRTIFDITNNLSIVILALRPSDAGTYECVVQKYEKDAFKWEHLAEVTLSVKAD

SEQ ID NO: 447 - protein, 107 aa, Artificial Sequence
  CD80 v227 IgV
VIHVTKEVKEVATLSCGHNVSVEELEQTRIYWQKDKKMVLTMISGDLNIWPEYKNRTIFDITNNLSIVILALRPSDEGTYECVVQEYEKDAFKWEHLAEVTLSVKAD

SEQ ID NO: 448 - protein, 107 aa, Artificial Sequence
  CD80 v228 IgV
VIHVTKEVKEVATLSCGHNVSVEELAHTRIYWLKDKKMVLTMMSGDVNIWPEYKDRTIFDITNNLSIVILALRPSDEGTYECVVQKYENDAFKREHLAEVTLSVKAD

SEQ ID NO: 449 - protein, 107 aa, Artificial Sequence
  CD80 v229 IgV
VIHVTKEVKEVATLSCGYNASVEELAQTRIYWLKDKKMVLTMMSGDVNIWPEFKNRTIFDITNNLSIVILALRPSDEGTYECVVLKYEKDAFKREHLAEVTLSVKAD

SEQ ID NO: 450 - protein, 107 aa, Artificial Sequence
  CD80 v230 IgV
VIHVTKEVKEVATLSCGHNVSAEELAQTRIYWQKDKKMVLTMMSGDMNIWPEYKNRTIFDITNNLSIEILDLRPSDEGTYECVVLKYEKDAFKREHLAEVTLSVKAD

SEQ ID NO: 451 - protein, 107 aa, Artificial Sequence
  CD80 v231 IgV
VIHVTKEVKEVATLSCGHNVSVEELAQTRIYWLKDKKMVLTMMSGDLNIWPEYKNRTIFDITNNLSIVILGLRPSDEGTYECVVLKYEKDASKREHLAEVTLSVKAD

SEQ ID NO: 452 - protein, 107 aa, Artificial Sequence
  CD80 v232 IgV
VIHVTKEVKEVATLSCGHNVSAEELAQTHIYWQKDKKMVLTMMSGEINIWPEYKNRTIFDITNNLSIVILALRPSDEGTYECVVLKYEKDAFKREHLAEVTLSVKAD

SEQ ID NO: 453 - protein, 107 aa, Artificial Sequence
  CD80 v233 IgV
VIHVTKEVKEVATLSCGHNVSVEELAQTRIYWLKDKKMVLTMISGDMNIWPEYKNRTIFDITNNLSIVILALRPSDEGTYECVVQKYEKDAFKWEHLAEVTLSVKAD

SEQ ID NO: 454 - protein, 107 aa, Artificial Sequence
  CD80 v234 IgV
VIHVTKEVKEVATLSCGYNVSVEELAQTRIYWQKDKKMVLTMMSGDMNIWPEYKNRTIFDITNNLSIMILALRPSDEGTYECVVLKYEKDAFKREHQAEVTLSVKAD

SEQ ID NO: 455 - protein, 107 aa, Artificial Sequence
  CD80 v235 IgV
VIHVTKEVKEVATLSCGHNVSVEELAQTRIYWLKDKKMVLTMMSGDLNIWPEYKNRTIFDITNNLSIMILALRPSDEGTYECVVQKYDKDAFKREHLAEVTLSVKAD

SEQ ID NO: 456 - protein, 107 aa, Artificial Sequence
  CD80 v236 IgV
VIHVTKEVKEVATLSCGHNVSVEELAQTRIYWLKDKKMVLTMVSGDINIWPEYKNRTIFDITNNLSIVILGLRPSDEGTYECVVLKYEKDAFKREHLAEVTLSVKAD

SEQ ID NO: 457 - protein, 107 aa, Artificial Sequence
  CD80 v237 IgV
VIHVTKEVKEVATLSCGHNVSVEELAQTRIYWQKDKKMVLTMMSGDLNIWPEYKNRTIFDITNNLSIVILGLRPSDEGTYECVVLKYEKDAFKREHQAEVTLSVKAD

SEQ ID NO: 458 - protein, 107 aa, Artificial Sequence
  CD80 v238 IgV
VIHVTKEVKEVATLSCGHNVSVEELAQTRIYWQKDKKMVLTMMSGDVNIWPEYKNRTIFDITNNLSIVILGLRPSDEGTYECVVMKYEKDAFKREHQAEVTLSVKAD

SEQ ID NO: 459 - protein, 107 aa, Artificial Sequence
  CD80 v239 IgV
VIHVTKEVKEVATLSCGYNVSVEELAQTRIHWQKDKKMVLTMMSGDVNIWPEYKNRTIFDITNNLSIVILGLRPSDEGTYECVVQKYEKDAFKREHLAEVTLSVKAD

SEQ ID NO: 460 - protein, 107 aa, Artificial Sequence
  CD80 v240 IgV
VIHVTKEVKEVATLSCGHNVSVEELAQTRIYWQKDKKMVLTMMSGEVNIWPEYKNRTIFDITNNLSIVILALRPSDEGTYECVVLKYEKDAFKREHQAEVTLSVKAD

SEQ ID NO: 461 - protein, 107 aa, Artificial Sequence
  CD80 v241 IgV
VIHVTKEVKEVATLSCGHNVSVEELAQTRIYWQKDKKMVLTMMSGVINIWPEYKNRTIFDITNNLSIVILGLRPSDEGTYECVVLKYEKDAVKREHLAEVTLSVKAD

SEQ ID NO: 462 - protein, 107 aa, Artificial Sequence
  CD80 v242 IgV
VIHVTKEVKEVATLSCGHNVSVEELAQTRIYWQKDKKMVLTMMSGDVNIWPEYKNRTIFDIANNLSIVILGLRPSDEGTYECAVLKHEKDAFKREHMAEVTLSVKAD

SEQ ID NO: 463 - protein, 107 aa, Artificial Sequence
  CD80 v243 IgV
VIHVTKEVKEVATLSCGHNVSVEELAQTRIYWLKDKKMVLTMMSGDMKIWPEYKNRTIFDITNNLSIVILALRPSDEGTYECVVQKYEKDAFKREHQAEVTLSVKAD

SEQ ID NO: 464 - protein, 107 aa, Artificial Sequence
  CD80 v244 IgV
VIHVTKEVKEVATLSCGHNVSVEELAQTRIYWQKDKKMVLTMMSGDMNIWPEYKNRTIFDITNNLSIVILALRPSDEGTYECVVQKYEKDAFTRVHQAEVTLSVKAD

SEQ ID NO: 465 - protein, 107 aa, Artificial Sequence
  CD80 v245 IgV
VIHVTKEVKEVATLSCGHNVSVEELAQTRIYWQKDKKMVLTMMSGDVKIWPEYKNRTIFDITNNLSIMILALRPSDEGTYECVVLKYENDAFKREHLAEVTLSVKAD

SEQ ID NO: 466 - protein, 107 aa, Artificial Sequence
  CD80 v246 IgV
VIHVTKEVKEVATLSCGHNVSVEELAQTRIYWLKDKKMVLTMMSGDIDIWPEYKNRTIFDITNNLSIVILGLRPSDEGTYECVVLKYEKDAFKREHLAEVTLSVKAD

SEQ ID NO: 467 - protein, 107 aa, Artificial Sequence
  CD80 v247 IgV
VIHVTKEVKEVATLSCGHNVSVEELAQTHIYWQKDKKMVLTMVSGDINVWPEYKNRTIFDITNNLSIVILALRPSDEGTYECVVLKYEKDAFKREHLAEVTLSVKAD

SEQ ID NO: 468 - protein, 107 aa, Artificial Sequence
  CD80 v248 IgV
VIHVTKEVKEVATLSCGHNVSVEELAHTRIYWQKDKKMVLTMMSGDINIWPEYKNRTIFDITNNLSIVILALRPSDEGTYECVVQKYEKGAFKREHLAEVTLSVKAD

SEQ ID NO: 469 - protein, 107 aa, Artificial Sequence
  CD80 v249 IgV
VIHVTKEVKEVATLSCGHNVSVEELAQTRIYWQKDKKMVLTMMSGDINIWPEYKNRTIFDITNNLSIVILALRPSDEGTYECVVQKYEKGAFKREHLAEVTLSVKAD

SEQ ID NO: 470 - protein, 107 aa, Artificial Sequence
  CD80 v250 IgV
VIHVTKEVKEVATLSCGHNVSVEELAQTRIYWQKDKKMVLTMMSGDINIWPEYKNRTIFDISNNLSIVILALRPSDEGTYECVVQKYEKDAFKREHLAEVTLSVKAD

SEQ ID NO: 471 - protein, 107 aa, Artificial Sequence
  CD80 v251 IgV
VIHVTKEVKEVATLSCGHNVSVEELEQTRIYWQKDKKMVLTMMSGDLNIWPEYKNRTIFDITNNLSIVILGLRPSDEGTYECVVLKYEKDAFKREHLAEVTLSVKAD

SEQ ID NO: 472 - protein, 107 aa, Artificial Sequence
  CD80 v252 IgV
VIHVTKEVKEVATLSCGHNVSVEELAQTRIYWQKDKKMVLTMMSGDINIWPEYKNRTIFDITNNLSIVILALRPSDEGTYECVVLKQEEDAFKREHLAEVTLSVKAD

SEQ ID NO: 473 - protein, 107 aa, Artificial Sequence
  CD80 v253 IgV
VIHVTKEVKEVATLSCGHNVSAEELAQTRIYWQKDKKMVLTMMSGDINIWPEYKNRTIFDITNNLSIVILALRPSDEGTYECVVLKNEKDAFKREHLAEVTLSVKAD

SEQ ID NO: 474 - protein, 107 aa, Artificial Sequence
  CD80 v254 IgV
VIHVTKEVKEVATLSCGYNVSVEELEQTRIYWQKDKKMVLTMMSGDLNIWPEYKNRTIFDITNNLSIVILALRPSDEGTYECVVQKYEKGAFKREHLAEVTLSVKAD

SEQ ID NO: 475 - protein, 107 aa, Artificial Sequence
  CD80 v255 IgV
VIHVTKEVKEVATLSCGHNVSVEELAQTRIYWQKDKKMVLTMMSGDLNIWPEYKNRTIFDITNNLSIVILGLRPSDEGTYECVVQKYEKDAFKREHLAEVTLSVKAD

SEQ ID NO: 476 - protein, 107 aa, Artificial Sequence
  CD80 v256 IgV
VIHVTKEVKEVATLSCGHNVSVEELAQTRIYWQKDKKMVLTMMSGDVNIWPEYKNRTIFDITNNLSIVILGLRPSDEGTYECVVLKYDKDAFKREHLAEVTLSVKAD

SEQ ID NO: 477 - protein, 107 aa, Artificial Sequence
  CD80 v257 IgV
VIHVTKEVKEVATLSCGHNVSVEELAQTRIYWQKDKKMVLTMMSGDMNIWPEYKNRTIFDITNNLSIVILGLRPSDEGTYECVVLKYEKDAFKREHLAEVTLSVKAD

SEQ ID NO: 478 - protein, 107 aa, Artificial Sequence
  CD80 v258 IgV
VIHVTKEVKEVATLSCGHNVSVEELAQTRIYWQKDKKMVLTMMSGDVNIWPEYKNRTIFDITNNLSIVILGLRPSDEGTYECVVLKYEKDAFKREHLAEVTLSVKAD

SEQ ID NO: 479 - protein, 107 aa, Artificial Sequence
  CD80 v259 IgV
VIHVTKEVKEVATLSCGHNVSVEELAQTRVYWQKDKKMVLTMMSGDVNIWPEYKNRTIFDITNNLSIVILGLRPSDEGTYECVVLKYEKDVFKREHLAEVTLSVKAD

SEQ ID NO: 480 - protein, 107 aa, Artificial Sequence
  CD80 v260 IgV
VIHVTKEVKEVATLSCGHNVSVEELAQTRVCWQKDKKMVLTMMSGDVNIWPEYKNRTIFDITNNLSIVILGLRPSDEGTYECVVMKYEKDAFKREHLAEVTLSVKAD

SEQ ID NO: 481 - protein, 107 aa, Artificial Sequence
  CD80 v261 IgV
VIHVTKEVKEVATLSCGHNVSDEELAQTRIYWQKDKKMVLTMMSGDLNIWPEYKNRTIFDITNNLSIVILALRPSDEGTYECVVQKYEKDAFKREHLAEVTLSVKAD

SEQ ID NO: 482 - protein, 107 aa, Artificial Sequence
  CD80 v262 IgV
VIHVTKEVKEVATLSCGYNVSVEELAQTRIYWQKDKKMVLTMMSGDMKIWPEYKNRTIFDITNNLSIVILALRPSDEGTYECVVLKYEKDAFKREHLAEVTLSVKAD

SEQ ID NO: 483 - protein, 107 aa, Artificial Sequence
  CD80 v263 IgV
VIHVTKEVKEVATLSCGHNVSVEELAQTRIYWQKDKKMVLSMMSGDVNIWPEYKNRTIFDITNNLSIVILGLRPSDEGTYECVVLKYENDAFKREHLAEVTLSVKAD

SEQ ID NO: 484 - protein, 107 aa, Artificial Sequence
  CD80 v264 IgV
VIHVTKEVKEVATLSCGHNVSVEELAQTRIYWQKDKKMVLTMMSGDVTIWPEYKNRTIFDITNNLSIVILALRPSDEGTYECVVQKYEKDAFKREHLAEVTLSVKAD

SEQ ID NO: 485 - protein, 107 aa, Artificial Sequence
  CD80 v265 IgV
VIHVTKEVKEVATLSCGHNVSVEELAQTRIYWQKDKKMVLTMMSGEVNIWPEYKNRTIFDITNNLSIVILDLRPSDEGTYECVVLKYEKGAFKREHLAEVTLSVKAD

SEQ ID NO: 486 - protein, 107 aa, Artificial Sequence
  CD80 v266 IgV
VIHVTKEVKEVATLSCGHNVSVEELAQTRIYWQKDKKMVLTMMSGEVNIWPEYKNRTIFDITNNLSIVILDLRPSDEGTYECVVLKYEKDAFKREHLAEVTLSVKAD

SEQ ID NO: 487 - protein, 107 aa, Artificial Sequence
  CD80 v267 IgV
VIHVTKEVKEVATLSCGHNVSVEELAQTRIYWQKDKKMVLSMISGDMNIWPEYKNRTIFDITNNLSIVILGLRPSDEGTYECVVLKYEKGAFKREHLAEVTLSVKAD

SEQ ID NO: 488 - protein, 107 aa, Artificial Sequence
  CD80 v268 IgV
VIHVTKEVKEVATLSCGHNVSVEELAQTRIYWQKDKKMVLSMISGDVNIWPEYKNRTIFDITNNLSIVILGLRPSDEGTYECVVLKYEKDAFKREHLAEVTLSVKAD

SEQ ID NO: 489 - protein, 107 aa, Artificial Sequence
  CD80 v269 IgV
VIHVTKEVKEVATLSCGHNVSVEELAQTRIYWQKDKKMVLSMISGDLNIWPEYKNRTIFDITNNLSIVILGLRPSDEGTYECVVLKYEKDAFKREHLAEVTLSVKAD

SEQ ID NO: 490 - protein, 107 aa, Artificial Sequence
  CD80 v270 IgV
VIHVTKEVKEVATLSCGYNVSAEELAQTRIYWQKDKKMVLTMMSGDVNIWPEYKNRTIFDISNNLSIVILGLRPSDEGTYECVVLKYEKDAFKREHLAEVTLSVKAD

SEQ ID NO: 491 - protein, 107 aa, Artificial Sequence
  CD80 v271 IgV
VIHVTKEVKEVATLSCGYNVSVEELEQTRIYWQKDKKMVLTMMSGDLNIWPEYKNRTIFDITNNLSIMILGLRPSDEGTYECVVLKYEKGAFKREHLAEVTLSVKAD

SEQ ID NO: 492 - protein, 107 aa, Artificial Sequence
  CD80 v272 IgV
VIHVTKEVKEVATLSCGHNVSVEELAQTRIYWQKDKEMVLTMMSGDVDIWPEYKNRTIFDITNNLSIVILALRPSDEGTYECVVQKYEKNAFKREHLAEVTLSVKAD

SEQ ID NO: 493 - protein, 107 aa, Artificial Sequence
  CD80 v273 IgV
VIHVTKEVKEVATLSCGHNVSVEELAHTRIYWQKDKKMVLTMMSGVLNIWPEYKNRTIFDITNNLSIVILGLRPSDEGTYECVVLKYEKDAFKREHLAEVTLSVKAD

SEQ ID NO: 494 - protein, 107 aa, Artificial Sequence
  CD80 v274 IgV
VIHVTKEVKEVATLSCGHNVSLEELAHTRIYWQKDKKMVLTMMSGDINIWPEYKNRTIFDITNNLSIVILGLRPSDEGTYECVVLKYEKDAFKREHLAEVTLSVKAD

SEQ ID NO: 495 - protein, 107 aa, Artificial Sequence
  CD80 v275 IgV
VIHVTKEVKEVATLSCGHNVSVEELAQTRIYWQKDKKMVLTMMSGVLNIWPEYKNRTIFDITNNLSIMILALRPSDEGTYECVVQKYDKDAFKREHLAEVTLSVKAD

SEQ ID NO: 496 - protein, 107 aa, Artificial Sequence
  CD80 v276 IgV
VIHVTKEVKEVATLSCGHNVSVEELAQTRIYWQKDKKMVLSMVSGDINIWPEYKNRTIFDITNNLSIVIMGLRPSDEGTYECVVLKYEKDAFKREHLAEVTLSVKAD

SEQ ID NO: 497 - protein, 107 aa, Artificial Sequence
  CD80 v277 IgV
VIHVTKEVKEVATLSCGHNVSVEELAQTRIYWQKDKKMVLTMMSGEVNIWPEYKNRTIFDITDNLSIVILALRPSDEGTYECVVQKYEKDAFKREHLAEVTLSVKAD

SEQ ID NO: 498 - protein, 107 aa, Artificial Sequence
  CD80 v278 IgV
VIHVTKEVKEVATLSCGHNVSVEELAQTRIYWQKDKKMVLTMMSGDVNIWPEYKNRTIFDIANNLSIVILDLRPSDEGTYECVVLKYEKDAFEREHLAEVTLSVKAD

SEQ ID NO: 499 - protein, 107 aa, Artificial Sequence
  CD80 v279 IgV
VIHVTKEVKEVATLSCGHNVSVEELAQTRIYWQKDKKMVLTMMSGEVNIWPEYKNRTIFDITNNLSIMILALRPSDEGTYECVVLKYEKGAFEREHLAEVTLSVKAD

SEQ ID NO: 500 - protein, 107 aa, Artificial Sequence
  CD80 v280 IgV
VIHVTKEVKEVATLSCGHNVSVEELAQTRIYWQKDKKMVLTMISGDVNIWPEYKNRTIFDITNNLSIVILALRPSDEGTYECVVLKYENDAFKREHLAEVTLSVKAD

SEQ ID NO: 501 - protein, 107 aa, Artificial Sequence
  CD80 v281 IgV
VIHVTKEVKEVATLSCGHNVSVEELAQTRIYWQKDKKMVLTMMSGDLNIWPEYKNRTIFDITNNLSIVILGLRPSDEGTYECVVMKYEKDAYKREHLAEVTLSVKAD

SEQ ID NO: 502 - protein, 107 aa, Artificial Sequence
  CD80 v282 IgV
VIHVTKEVKEVATLSCGHNVSVEELAQTRIYWQKDKKMVLTVMSGDVNIWPDYKNRTIFDITNNLSIVILALRPSDEGTYECVVQKYEKDAFKREHLAEVTLSVKAD

SEQ ID NO: 503 - protein, 107 aa, Artificial Sequence
  CD80 v283 IgV
VIHVTKEVKEVATLSCGHNVSDEELAQTRIYWQKDKKMVLTMMSGDLNIWPEYKNRTIFDITNNLSIVIMALRPSDEGTYECVVLKYEKDAFKREHQAEVTLSVKAD

SEQ ID NO: 504 - protein, 107 aa, Artificial Sequence
  CD80 v284 IgV
VIHVTKEVKEVATLSCGHNVSVEELAQTRIYWQKDKKMVLSMMSGDVNIWPEYKNRTIFDITNNLSIVILALRPSDEGTYECVVLKYEKDAFKREHQAEVTLSVKAD

SEQ ID NO: 505 - protein, 107 aa, Artificial Sequence
  CD80 v285 IgV
VIHVTKEVKEVATLSCGHNVSVEELAQTRIYWQKDKKMVLTMMSGDMNIWPEHKNRTIFDITNNLSIVILGLRPSDEGTYECVVLKYEKGAFKREHRAEVTLSVKAD

SEQ ID NO: 506 - protein, 107 aa, Artificial Sequence
  CD80 v286 IgV
VIHVTKEVKEVATLSCGHNVSVEELAQTRIYWQKDKKMVLTMMSGDMNIWPEYKNRTIFDITNNLSIVILDVHPSDEGTYKCVVLKYEKDAFKREHLAEVTLSVKAD

SEQ ID NO: 507 - protein, 107 aa, Artificial Sequence
  CD80 v287 IgV
VIHVTKEVKEVATLSCGHNVSVEELAQTRIYWLKDKKMVLTMISGDMNIWPEFKNRTIFDISNNLSIVILALRPSDEGTYECVVQKYEKDAFKREHLAEVTLSVKAD

SEQ ID NO: 508 - protein, 107 aa, Artificial Sequence
  CD80 v288 IgV
VIHVTKEVKEVATLSCGHNVSVEELAQTRIYWQKDKKTVLTMMSGEVSIWPEYKNRTIFDITNNLSIVILALRPSDEGTYECVVLKYEKDAFKREHLAEVTLSVKAD

SEQ ID NO: 509 - protein, 107 aa, Artificial Sequence
  CD80 v289 IgV
VIHVTKEVKEVATLSCGHNVSVEELAQTRIYWRKDKKMVLTMMSGDVKIWPEYKNRTIFDITNNLSIVILALRPSDEGTYECVVMKYEKDALKREHLAEVTLSVKAD

SEQ ID NO: 510 - protein, 107 aa, Artificial Sequence
  CD80 v290 IgV
VIHVTKEVKEVATLSCGHNVSVEELAQTRIYWQKDKKTVLTMVSGDVRIWPEYKNRTIFDITNNLSIVILALRPSDEGTYECVVQKYEKDAFKREHLAEVTLSVKAD

SEQ ID NO: 511 - protein, 107 aa, Artificial Sequence
  CD80 v291 IgV
VIHVTKEVKEVATLSCGHNVSVEELAQYRIYWHKDKKMVLTMMSGVINIWPEYKNRTIFDITNNLSIVILGLRPSDEGTYECVVLKYEKDAFKREHLAEVTLSVKAD

SEQ ID NO: 512 - protein, 208 aa, Artificial Sequence
  CD80 v292 ECD
VIHVTKEVKEVATLSCGHNVSVEELAQTRIYWQKDKKMVLTMMSGDMKIWPEYKNRTIFDITNNLSIVILAVRPSDEGTYECVVLKYEKDAFKREHLAEVTLSVKADFPTPSISDFETPTSNIRRIICSTSGGFPEPHLSWLENGEELNAINTTVSQDPETELYAVSSKLDFNMTTNHSFMCLIKYGHLRVNQTFNWNTTKQEHFPDN

SEQ ID NO: 513 - protein, 208 aa, Artificial Sequence
  CD80 v293 ECD
VIHVTKEVKEVATLSCGHNVSVEELAQTRIYWQKDKKMVLSMMSGDMTIWPEYKNRTIFDITNNLSIVILALRPSDEGTYECVVLKYEKDAFKREHLAEVTLSVKADFPTPSISDFETPTSNIRRIICSTSGGFPEPHLSWLENGEELNAINTTVSQDPETELYAVSSKLDFNMTTNHSFMCLIKYGHLRVNQTFNWNTTKQEHFPDN

SEQ ID NO: 514 - protein, 208 aa, Artificial Sequence
  CD80 v294 ECD
VIHVTKEVKEVATLSCGHNVSVEELAQTRIYWQKEKKMVLTMMSGVINIWPEYKNRTIFDITNNLSIVILGLRPSDEGTYECVVLKYEKDAFKREHLAEVTLSVKADFPTPSISDFETPTSNIRRIICSTSGGFPEPHLSWLENGEELNAINTTVSQDPETELYAVSSKLDFNMTTNHSFMCLIKYGHLRVNQTFNWNTTKQEHFPDN

SEQ ID NO: 515 - protein, 208 aa, Artificial Sequence
  CD80 v295 ECD
VIHVTKEVKEVATLSCGHNVSVEELAQTRIYWQKEKKMVLTMMSGDINIWPEYKNRTIFDITNNLSIVILGLRPSDEGTYECVVLKYEKDAFKREHLAEVTLSVKADFPTPSISDFETPTSNIRRIICSTSGGFPEPHLSWLENGEELNAINTTVSQDPETELYAVSSKLDFNMTTNHSFMCLIKYGHLRVNQTFNWNTTKQEHFPDN

SEQ ID NO: 516 - protein, 208 aa, Artificial Sequence
  CD80 v296 ECD
VIHVTKEVKEVATLSCGHNVSVEELAQTRIYWQKDKKMVLTMISGDLNIWPEYKNRTIFDITNNLSIVILALRPSDEGTYECVVMKYEKDAFKREHLAEVTLSVKADFPTPSISDFETPTSNIRRIICSTSGGFPEPHLSWLENGEELNAINTTVSQDPETELYAVSSKLDFNMTTNHSFMCLIKYGHLRVNQTFNWNTTKQEHFPDN

SEQ ID NO: 517 - protein, 208 aa, Artificial Sequence
  CD80 v297 ECD
VIHVTKEVKEVATLSCGHNVSVEELAQTRIYWQKDKKMVLTMISGEMNIWPEYKNRTIFDITNNLSIVILGLRPSDEGTYECVVMKYEKDAFKREHLAEVTLSVKADFPTPSISDFETPTSNIRRIICSTSGGFPEPHLSWLENGEELNAINTTVSQDPETELYAVSSKLDFNMTTNHSFMCLIKYGHLRVNQTFNWNTTKQEHFPDN

SEQ ID NO: 518 - protein, 208 aa, Artificial Sequence
  CD80 v298 ECD
VIHVTKEVKEVATLSCGYNVSVEELAQTRIYWQKDKKMVLTMMSGDLNIWPEYKNRTIFDITNNLSIVILGLRPSDEGTYECVVLKYEKDSFKREHLAEVTLSVKADFPTPSISDFETPTSNIRRIICSTSGGFPEPHLSWLENGEELNAINTTVSQDPETELYAVSSKLDFNMTTNHSFMCLIKYGHLRVNQTFNWNTTKQEHFPDN

SEQ ID NO: 519 - protein, 208 aa, Artificial Sequence
  CD80 v299 ECD
VIHVTKEVKEVATLSCGHNVSVEELAQTRIYWQKDKKMVLTMMSGDIKIWPEYKNRTIFDFTNNLSIVILALRPSDEGTYECVVLKYEKDAFKREHLAEVTLSVKADFPTPSISDFETPTSNIRRIICSTSGGFPEPHLSWLENGEELNAINTTVSQDPETELYAVSSKLDFNMTTNHSFMCLIKYGHLRVNQTFNWNTTKQEHFPDN

SEQ ID NO: 520 - protein, 208 aa, Artificial Sequence
  CD80 v300 ECD
VIHVTKEVKEVATLSCGHNVSVEELAQTRIYWQKDKKMVLTMMSGDVNIWPEYKNRTIFDISNNLSIVILALRPSDEGTYECVVQKYEKDAFKREHLAEVTLSVKADFPTPSISDFETPTSNIRRIICSTSGGFPEPHLSWLENGEELNAINTTVSQDPETELYAVSSKLDFNMTTNHSFMCLIKYGHLRVNQTFNWNTTKQEHFPDN

SEQ ID NO: 521 - protein, 208 aa, Artificial Sequence
  CD80 v301 ECD
VIHVTKEVKEVATLSCGHNVSVEELAQTRIYWQKEKKMVLTMISGDLNIWPEYKNRTIFDITNNLSIVILGLRPSDEGTYECVVLKYEKDAFKREHLAEVTLSVKADFPTPSISDFETPTSNIRRIICSTSGGFPEPHLSWLENGEELNAINTTVSQDPETELYAVSSKLDFNMTTNHSFMCLIKYGHLRVNQTFNWNTTKQEHFPDN

SEQ ID NO: 522 - protein, 208 aa, Artificial Sequence
  CD80 v302 ECD
VIHVTKEVKEVATLSCGHNVSVEELAQTRIYWQKDKKMVLTMMSGDVNIWPEYKNRTIFDITNNLSIVILALRPSDEGTYECVVLKYEKDAFKREHLAEVTLSVKADFPTPSISDFETPTSNIRRIICSTSGGFPEPHLSWLENGEELNAINTTVSQDPETELYAVSSKLDFNMTTNHSFMCLIKYGHLRVNQTFNWNTTKQEHFPDN

SEQ ID NO: 523 - protein, 208 aa, Artificial Sequence
  CD80 v303 ECD
VIHVTKEVKEVATLSCGHNVSVEELAQTRIYWQKDKKMVLTMMSGDLNIWPEYKNRTIFDITNNLSIVILGLRPSDEGTYECVVMKYEKDAFKREHLAEVTLSVKADFPTPSISDFETPTSNIRRIICSTSGGFPEPHLSWLENGEELNAINTTVSQDPETELYAVSSKLDFNMTTNHSFMCLIKYGHLRVNQTFNWNTTKQEHFPDN

SEQ ID NO: 524 - protein, 208 aa, Artificial Sequence
  CD80 v304 ECD
VIHVTKEVKEVATLSCGHNVSAEELAQTRIYWQKDKKMVLTMMSGDLNIWPEYKNRTIFDITNNLSIVILGLRPSDEGTYECVVLKYEKDAFKREHLAEVTLSVKADFPTPSISDFETPTSNIRRIICSTSGGFPEPHLSWLENGEELNAINTTVSQDPETELYAVSSKLDFNMTTNHSFMCLIKYGHLRVNQTFNWNTTKQEHFPDN

SEQ ID NO: 525 - protein, 208 aa, Artificial Sequence
  CD80 v305 ECD
VIHVTKEVKEVATLSCGHNVSVEELAQTRIYWQKDKKMVLTMMSGDLNIWPEYKNRTIFDITNNLSIVILGLRPSDEGTYECVVLKYEKDAFKREHLAEVTLSVKADFPTPSISDFETPTSNIRRIICSTSGGFPEPHLSWLENGEELNAINTTVSQDPETELYAVSSKLDFNMTTNHSFMCLIKYGHLRVNQTFNWNTTKQEHFPDN

SEQ ID NO: 526 - protein, 208 aa, Artificial Sequence
  CD80 v306 ECD
VIHVTKEVKEVATLSCGHNVSVEELAQTRIYWQKDKKMVLTMMSGEINIWPEYKNRTIFDITNNLSIVILALRPSDEGTYECVVLKYEKDAFKREHLAEVTLSVKADFPTPSISDFETPTSNIRRIICSTSGGFPEPHLSWLENGEELNAINTTVSQDPETELYAVSSKLDFNMTTNHSFMCLIKYGHLRVNQTFNWNTTKQEHFPDN

SEQ ID NO: 527 - protein, 208 aa, Artificial Sequence
  CD80 v307 ECD
VIHVTKEVKEVATLSCGHNVSVEELAHTRIYWQKDKKMVLTMMSGDINIWPEYKNRTIFDITNNLSIVILALRPSDEGTYECVVLKYEKDAFKREHLAEVTLSVKADFPTPSISDFETPTSNIRRIICSTSGGFPEPHLSWLENGEELNAINTTVSQDPETELYAVSSKLDFNMTTNHSFMCLIKYGHLRVNQTFNWNTTKQEHFPDN

SEQ ID NO: 528 - protein, 208 aa, Artificial Sequence
  CD80 v308 ECD
VIHVTKEVKEVATLSCGHNVSVEELAQTRIYWQKDKKMVLTMMSGEMNIWPEYKNRTIFDITNNLSIVILALRPSDEGTYECVVMKYEKDAFKREHLAEVTLSVKADFPTPSISDFETPTSNIRRIICSTSGGFPEPHLSWLENGEELNAINTTVSQDPETELYAVSSKLDFNMTTNHSFMCLIKYGHLRVNQTFNWNTTKQEHFPDN

SEQ ID NO: 529 - protein, 208 aa, Artificial Sequence
  CD80 v309 ECD
VIHVTKEVKEVATLSCGHNVSVEELAQTRIYWQKDKKMVLTMMSGEMNIWPEYKNRTIFDITNNLSIVILALRPSDEGTYECVVLKYEKDGFKREHLAEVTLSVKADFPTPSISDFETPTSNIRRIICSTSGGFPEPHLSWLENGEELNAINTTVSQDPETELYAVSSKLDFNMTTNHSFMCLIKYGHLRVNQTFNWNTTKQEHFPDN

SEQ ID NO: 530 - protein, 208 aa, Artificial Sequence
  CD80 v310 ECD
VIHVTKEVKEVATLSCGHNVSVEELAQTRIYWQKDKKMVLTMMSGEMNIWPEYKNRTIFDITNNLSIVILALRPSDEGTYECVVLKYEKDAFKREHLAEVTLSVKADFPTPSISDFETPTSNIRRIICSTSGGFPEPHLSWLENGEELNAINTTVSQDPETELYAVSSKLDFNMTTNHSFMCLIKYGHLRVNQTFNWNTTKQEHFPDN

SEQ ID NO: 531 - protein, 208 aa, Artificial Sequence
  CD80 v311 ECD
VIHVTKEVKEVATLSCGHNVSVEELAQTRIYWQKDKKMVLTMMSGDMNIWPEYKNRTIFDITNNLSIVILALRPSDEGTYECVVLKYEKDAFKREHRAEVTLSVKADFPTPSISDFETPTSNIRRIICSTSGGFPEPHLSWLENGEELNAINTTVSQDPETELYAVSSKLDFNMTTNHSFMCLIKYGHLRVNQTFNWNTTKQEHFPDN

SEQ ID NO: 532 - protein, 208 aa, Artificial Sequence
  CD80 v312 ECD
VIHVTKEVKEVATLSCGYNVSVEELAQTRIYWQKDKKMVLTMMSGDMNIWPEYKNRTIFDITNNLSIVILALRPSDEGTYECVVLKYEKDAFKREHLAEVTLSVKADFPTPSISDFETPTSNIRRIICSTSGGFPEPHLSWLENGEELNAINTTVSQDPETELYAVSSKLDFNMTTNHSFMCLIKYGHLRVNQTFNWNTTKQEHFPDN

SEQ ID NO: 533 - protein, 208 aa, Artificial Sequence
  CD80 v313 ECD
VIHVTKEVKEVATLSCGHNVSVEELALTRIYWQKDKKMVLTMMSGDVNIWPEYKNRTIFDVTNNLSIVILALRPSDEGTYECVVMKYEKDAFKREHLAEVTLSVKADFPTPSISDFETPTSNIRRIICSTSGGFPEPHLSWLENGEELNAINTTVSQDPETELYAVSSKLDFNMTTNHSFMCLIKYGHLRVNQTFNWNTTKQEHFPDN

SEQ ID NO: 534 - protein, 208 aa, Artificial Sequence
  CD80 v314 ECD
VIHVTKEVKEVATLSCGHNVSVEELAQTRIYWQKDKKMVLTMMSGDVNIWPEYKNRTIFDVTNNLSIVILALRPSDEGTYECVVMKYEKDAFKREHLAEVTLSVKADFPTPSISDFETPTSNIRRIICSTSGGFPEPHLSWLENGEELNAINTTVSQDPETELYAVSSKLDFNMTTNHSFMCLIKYGHLRVNQTFNWNTTKQEHFPDN

SEQ ID NO: 535 - protein, 208 aa, Artificial Sequence
  CD80 v315 ECD
VIHVTKEVKEVATLSCGHNVSVEELAQTRIYWQKDKKMVLTMMSGDVNIWPEYKNRTIFDITNNLSIVILALRPSDEGTYECVVMKYEKDAFKQEHLAEVTLSVKADFPTPSISDFETPTSNIRRIICSTSGGFPEPHLSWLENGEELNAINTTVSQDPETELYAVSSKLDFNMTTNHSFMCLIKYGHLRVNQTFNWNTTKQEHFPDN

SEQ ID NO: 536 - protein, 208 aa, Artificial Sequence
  CD80 v316 ECD
VIHVTKEVKEVATLSCGHNVSVEELAQTRIYWQKDKKMVLTMMSGDVKIWPEYKNRTIFDITNNLSIVILALRPSDEGTYECVVMKYEKDAFKREHLAEVTLSVKADFPTPSISDFETPTSNIRRIICSTSGGFPEPHLSWLENGEELNAINTTVSQDPETELYAVSSKLDFNMTTNHSFMCLIKYGHLRVNQTFNWNTTKQEHFPDN

SEQ ID NO: 537 - protein, 208 aa, Artificial Sequence
  CD80 v317 ECD
VIHVTKEVKEVATLSCGYNVSVEELAQTRIYWQKDKKMVLTMMSGDVKIWPEYKNRTIFDITNNLSIVILALRPSDEGTYECVVLKYEKDAFKREHLAEVTLSVKADFPTPSISDFETPTSNIRRIICSTSGGFPEPHLSWLENGEELNAINTTVSQDPETELYAVSSKLDFNMTTNHSFMCLIKYGHLRVNQTFNWNTTKQEHFPDN

SEQ ID NO: 538 - protein, 208 aa, Artificial Sequence
  CD80 v318 ECD
VIHVTKEVKEVATLSCGHNVSVEELERTRIYWQKDKKMVLTMMSGDLYIWPEYKNRTIFDITNNLSIVILALRPSDEGTYECVVQKYEKDAFKREHLAEVTLSVKADFPTPSISDFETPTSNIRRIICSTSGGFPEPHLSWLENGEELNAINTTVSQDPETELYAVSSKLDFNMTTNHSFMCLIKYGHLRVNQTFNWNTTKQEHFPDN

SEQ ID NO: 539 - protein, 208 aa, Artificial Sequence
  CD80 v319 ECD
VIHVTKEVKEVATLSCGHNVSVEELAQTRIYWQKDKKMVLTMMSGELNIWPEYKNRTIFDITNNLSIMILALRPSDEGTYECVVQKYEKDALKREHLAEVTLSVKADFPTPSISDFETPTSNIRRIICSTSGGFPEPHLSWLENGEELNAINTTVSQDPETELYAVSSKLDFNMTTNHSFMCLIKYGHLRVNQTFNWNTTKQEHFPDN

SEQ ID NO: 540 - protein, 208 aa, Artificial Sequence
  CD80 v320 ECD
VIHVTKEVKEVATLSCGHNVSVEELAQTRIYWQKDKKMVLTMMSGDINIWPEYKNRTIFDISNNLSIVILALRPSDEGTYECVVQKYDKDAFKREHLAEVTLSVKADFPTPSISDFETPTSNIRRIICSTSGGFPEPHLSWLENGEELNAINTTVSQDPETELYAVSSKLDFNMTTNHSFMCLIKYGHLRVNQTFNWNTTKQEHFPDN

SEQ ID NO: 541 - protein, 208 aa, Artificial Sequence
  CD80 v321 ECD
VIHVTKEVKEVATLSCGHNVSVEDLARTRIYWQKDKKMVLSMMSGDVNIWPEYKNRTIFDITNNLSIVILALRPSDEGTYECVVQKYEKDAFKREHLAEVTLSVKADFPTPSISDFETPTSNIRRIICSTSGGFPEPHLSWLENGEELNAINTTVSQDPETELYAVSSKLDFNMTTNHSFMCLIKYGHLRVNQTFNWNTTKQEHFPDN

SEQ ID NO: 542 - protein, 208 aa, Artificial Sequence
  CD80 v322 ECD
VIHVTKEVKEVATLTCGYNVSVEELAQTRIYWQKDKKMVLTMMSGDVNIWPEYKNRTIFDIANSLSIVILGLRPSDEGTYECVVQKYEKNAFKREHLAEVTLSVKADFPTPSISDFETPTSNIRRIICSTSGGFPEPHLSWLENGEELNAINTTVSQDPETELYAVSSKLDFNMTTNHSFMCLIKYGHLRVNQTFNWNTTKQEHFPDN

SEQ ID NO: 543 - protein, 208 aa, Artificial Sequence
  CD80 v323 ECD
VIHVTKEVKEVATLSCGHNVSVEELAQTRIYWQKDKKMVLTMMSGDLNIWPEYKNRTIFDITNNLSIMILGLRPSDEGTYECVVQKYEKGAFKREHLAEVTLSVKADFPTPSISDFETPTSNIRRIICSTSGGFPEPHLSWLENGEELNAINTTVSQDPETELYAVSSKLDFNMTTNHSFMCLIKYGHLRVNQTFNWNTTKQEHFPDN

SEQ ID NO: 544 - protein, 208 aa, Artificial Sequence
  CD80 v324 ECD
VIHVTKEVKEVATLSCGYNVSVEELAQTRIYWQKDKKMVLTMMSGDINIWPEYKNRTIFDITNNLSIMILGLRPSDEGTYECVVLKYEKDAFKLEHLAEVTLSVKADFPTPSISDFETPTSNIRRIICSTSGGFPEPHLSWLENGEELNAINTTVSQDPETELYAVSSKLDFNMTTNHSFMCLIKYGHLRVNQTFNWNTTKQEHFPDN

SEQ ID NO: 545 - protein, 119 aa, Artificial Sequence
  CD80 v325 ECD
VIHVTKEVKEVTLSVKADFPTPSISDFETPTSNIRRIICSTSGGFPEPHLSWLENGEELNAINTTVSQDPETELYAVSSKLDFNMTTNHSFMCLIKYGHLRVNQTFNWNTTKQEHFPDN

SEQ ID NO: 546 - protein, 208 aa, Artificial Sequence
  CD80 v326 ECD
VIHVTKEVKEVATLSCGHNVSVEELAQTRIYWRKEKKMVLTMMSGDVNIWPEYKNRTIFDINNNLSIVILGLRPSDEGTYECVVLKYEKDAFKREHLAEVTLSVKADFPTPSISDFETPTSNIRRIICSTSGGFPEPHLSWLENGEELNAINTTVSQDPETELYAVSSKLDFNMTTNHSFMCLIKYGHLRVNQTFNWNTTKQEHFPDN

SEQ ID NO: 547 - protein, 208 aa, Artificial Sequence
  CD80 v327 ECD
VIHVTKEVKEVATLSCGYNVSAEELAQTRIYWQKDKKMVLSMMSGDVNIWPEYKNRTIFDINNNLSIVILGLRPSDEGTYECVVLKYEKDGFKREHLAEVTLSVKADFPTPSISDFETPTSNIRRIICSTSGGFPEPHLSWLENGEELNAINTTVSQDPETELYAVSSKLDFNMTTNHSFMCLIKYGHLRVNQTFNWNTTKQEHFPDN

SEQ ID NO: 548 - protein, 208 aa, Artificial Sequence
  CD80 v328 ECD
VIHVTKEVKEVATLSCGHNVSVEELAQTRIYWQKDKKMVLTMMSGDLNIWPEYKNRTIFDITNNLSIVIMALRPSDEGTYECVVLKYEKDAFKREHLAEVTLSVKADFPTPSISDFETPTSNIRRIICSTSGGFPEPHLSWLENGEELNAINTTVSQDPETELYAVSSKLDFNMTTNHSFMCLIKYGHLRVNQTFNWNTTKQEHFPDN

SEQ ID NO: 549 - protein, 208 aa, Artificial Sequence
  CD80 v329 ECD
VIHVTKEVKEVATLSCGHNVSVEELAQTRIYWQKDKKMVLTMMSGDLNIWPEYKNRTIFDITNNLSIMILALRPSDEGTYECVVLKYEKDAFKREHLAEVTLSVKADFPTPSISDFETPTSNIRRIICSTSGGFPEPHLSWLENGEELNAINTTVSQDPETELYAVSSKLDFNMTTNHSFMCLIKYGHLRVNQTFNWNTTKQEHFPDN

SEQ ID NO: 550 - protein, 208 aa, Artificial Sequence
  CD80 v330 ECD
VIHVTKEVKEVATLSCGHNVSVEELAQTRIYWQKDKKMVLTMMSGVLNIWPEYKNRTIFDITNNLSIMILALRPSDEGTYECVVLKYDKDAFKREHLAEVTLSVKADFPTPSISDFETPTSNIRRIICSTSGGFPEPHLSWLENGEELNAINTTVSQDPETELYAVSSKLDFNMTTNHSFMCLIKYGHLRVNQTFNWNTTKQEHFPDN

SEQ ID NO: 551 - protein, 208 aa, Artificial Sequence
  CD80 v331 ECD
VIHVTKEVKEVATLSCGHNVSVEELAQTRIYWQKDKKMVLTMMSGVLNIWPEYKNRTIFDITNNLSIMILALRPSDEGTYECVVLKYEKGAFKREHLAEVTLSVKADFPTPSISDFETPTSNIRRIICSTSGGFPEPHLSWLENGEELNAINTTVSQDPETELYAVSSKLDFNMTTNHSFMCLIKYGHLRVNQTFNWNTTKQEHFPDN

SEQ ID NO: 552 - protein, 208 aa, Artificial Sequence
  CD80 v332 ECD
VIHVTKEVKEVATLSCGHNVSVEELAQTRIYWQKDKKMVLTMMSGVLNIWPEYKNRTIFDITNNLSIMILALRPSDEGTYECVVLKYENDAFKREHLAEVTLSVKADFPTPSISDFETPTSNIRRIICSTSGGFPEPHLSWLENGEELNAINTTVSQDPETELYAVSSKLDFNMTTNHSFMCLIKYGHLRVNQTFNWNTTKQEHFPDN

SEQ ID NO: 553 - protein, 208 aa, Artificial Sequence
  CD80 v333 ECD
VIHVTKEVKEVATLSCGHNVSVEELAQTRIYWQKDKKMVLTMMSGVLNIWPEYKNRTIFDITNNLSIMILALRPSDEGTYECVVQKYEKDAFKREHLAEVTLSVKADFPTPSISDFETPTSNIRRIICSTSGGFPEPHLSWLENGEELNAINTTVSQDPETELYAVSSKLDFNMTTNHSFMCLIKYGHLRVNQTFNWNTTKQEHFPDN

SEQ ID NO: 554 - protein, 208 aa, Artificial Sequence
  CD80 v334 ECD
VIHVTKEVKEVATLSCGHNVSVEELAQTRIYWQKDKKMVLTMMSGVLNIWPEYKNRTIFDITNNLSIMILALRPSDEGTYECVVLKYEKDAFKREHLAEVTLSVKADFPTPSISDFETPTSNIRRIICSTSGGFPEPHLSWLENGEELNAINTTVSQDPETELYAVSSKLDFNMTTNHSFMCLIKYGHLRVNQTFNWNTTKQEHFPDN

SEQ ID NO: 555 - protein, 208 aa, Artificial Sequence
  CD80 v335 ECD
VIHVTKEVKEVATLSCGHNVSVEELAQTRIYWQKDKKMVLTMMSGVLNIWPEYKNRTIFDITNNLSIVIMALRPSDEGTYECVVLKYEKDAFKREHLAEVTLSVKADFPTPSISDFETPTSNIRRIICSTSGGFPEPHLSWLENGEELNAINTTVSQDPETELYAVSSKLDFNMTTNHSFMCLIKYGHLRVNQTFNWNTTKQEHFPDN

SEQ ID NO: 556 - protein, 208 aa, Artificial Sequence
  CD80 v336 ECD
VIHVTKEVKEVATLSCGHNVSVEELAQTRIYWQKDKKMVLTMMSGVLNIWPEYKNRTIFDITNNLSIVIMALRPSDEGTYECVVQKYEKDAFKREHLAEVTLSVKADFPTPSISDFETPTSNIRRIICSTSGGFPEPHLSWLENGEELNAINTTVSQDPETELYAVSSKLDFNMTTNHSFMCLIKYGHLRVNQTFNWNTTKQEHFPDN

SEQ ID NO: 557 - protein, 208 aa, Artificial Sequence
  CD80 v337 ECD
VIHVTKEVKEVATLSCGHNVSVEELAQTRIYWQKDKKMVLTMMSGDVKIWPEYKNRTIFDITNNLSIMILALRPSDEGTYECVVLKYEKDAFKREHLAEVTLSVKADFPTPSISDFETPTSNIRRIICSTSGGFPEPHLSWLENGEELNAINTTVSQDPETELYAVSSKLDFNMTTNHSFMCLIKYGHLRVNQTFNWNTTKQEHFPDN

SEQ ID NO: 558 - protein, 208 aa, Artificial Sequence
  CD80 v338 ECD
VIHVTKEVKEVATLSCGHNVSVEDLAQTRIYWQKDKKMVLTMMSGDLNIWPEYKNRTIFDITNNLSIMILALRPSDEGTYECVVLKYEKDAFKRVHQAEVTLSVKADFPTPSISDFETPTSNIRRIICSTSGGFPEPHLSWLENGEELNAINTTVSQDPETELYAVSSKLDFNMTTNHSFMCLIKYGHLRVNQTFNWNTTKQEHFPDN

SEQ ID NO: 559 - protein, 208 aa, Artificial Sequence
  CD80 v339 ECD
VIHVTKEVKEVATLSCGHNVSVEELAQTRIYWQKDKKMVLTMMSGEINIWPEYKNRTIFDIANNLSIMILALRPSDEGTYECVVMKCEKDAFKREHLAEVTLSVKADFPTPSISDFETPTSNIRRIICSTSGGFPEPHLSWLENGEELNAINTTVSQDPETELYAVSSKLDFNMTTNHSFMCLIKYGHLRVNQTFNWNTTKQEHFPDN

SEQ ID NO: 560 - protein, 208 aa, Artificial Sequence
  CD80 v340 ECD
VIHVTKEVKEVATLSCGHNVSVEELAQTRIYWQKDKKMVLTMMSGEINIWPEYKNRTIFDITNNLSIMILALRPSDEGTYECVVMKYEKDAFKREHLAEVTLSVKADFPTPSISDFETPTSNIRRIICSTSGGFPEPHLSWLENGEELNAINTTVSQDPETELYAVSSKLDFNMTTNHSFMCLIKYGHLRVNQTFNWNTTKQEHFPDN

SEQ ID NO: 561 - protein, 208 aa, Artificial Sequence
  CD80 v341 ECD
VIHVTKEVKEVATLSCGHNVSVEELAQTRIYWQKDKKMVLTMMSGELNIWPEYKNRTIFDITNNLSIMILGLRPSDEGTYECVVLKCEKDAFRREHLAEVTLSVKADFPTPSISDFETPTSNIRRIICSTSGGFPEPHLSWLENGEELNAINTTVSQDPETELYAVSSKLDFNMTTNHSFMCLIKYGHLRVNQTFNWNTTKQEHFPDN

SEQ ID NO: 562 - protein, 208 aa, Artificial Sequence
  CD80 v342 ECD
VIHVTKEVKEVATLSCGHNVSVEELAQTRIYWQKDKKMVLTMMSGELNIWPEYKNRTIFDITNNLSIMILALRPSDEGMYECVVMKYEKDAFKREHLAEVTLSVKADFPTPSISDFETPTSNIRRIICSTSGGFPEPHLSWLENGEELNAINTTVSQDPETELYAVSSKLDFNMTTNHSFMCLIKYGHLRVNQTFNWNTTKQEHFPDN

SEQ ID NO: 563 - protein, 208 aa, Artificial Sequence
  CD80 v343 ECD
VIHVTKEVKEVATLSCGHNVSVEELAQTRIYWQKDKKMVLTMMSGELNIWPEYKNRTIFDITNNLSIMILALRPSDEGMYECVVMKYEKDAFKREHQAEVTLSVKADFPTPSISDFETPTSNIRRIICSTSGGFPEPHLSWLENGEELNAINTTVSQDPETELYAVSSKLDFNMTTNHSFMCLIKYGHLRVNQTFNWNTTKQEHFPDN

SEQ ID NO: 564 - protein, 208 aa, Artificial Sequence
  CD80 v344 ECD
VIHVTKEVKEVATLSCGHNVSVEELAQTRIYWQKDKKMVLTMMSGEVNIWPEYKNRTIFDITNNLSIMILALRPSDEGTYECVVQKYEKDAFKREHLAEVTLSVKADFPTPSISDFETPTSNIRRIICSTSGGFPEPHLSWLENGEELNAINTTVSQDPETELYAVSSKLDFNMTTNHSFMCLIKYGHLRVNQTFNWNTTKQEHFPDN

SEQ ID NO: 565 - protein, 208 aa, Artificial Sequence
  CD80 v345 ECD
VIHVTKEVKEVATLSCGHNVSVEELAQTRIYWQKDKKMVLTMISGDLNIWPEYKNRTIFDITNNLSIMILALRPSDEGTYECVVLKYEKDAFKREHLAEVTLSVKADFPTPSISDFETPTSNIRRIICSTSGGFPEPHLSWLENGEELNAINTTVSQDPETELYAVSSKLDFNMTTNHSFMCLIKYGHLRVNQTFNWNTTKQEHFPDN

SEQ ID NO: 566 - protein, 208 aa, Artificial Sequence
  CD80 v346 ECD
VIHVTKEVKEVATLSCGHNVSVEELAQTRIYWQKDKKMVLTMMSGDINIWPEYKNRTIFDITNNLSIMILALRPSDEGTYECVVLKNEKDAFKREHLAEVTLSVKADFPTPSISDFETPTSNIRRIICSTSGGFPEPHLSWLENGEELNAINTTVSQDPETELYAVSSKLDFNMTTNHSFMCLIKYGHLRVNQTFNWNTTKQEHFPDN

SEQ ID NO: 567 - protein, 208 aa, Artificial Sequence
  CD80 v347 ECD
VIHVTKEVKEVATLSCGHNVSVEELAQTRIYWQKDKKMVLTMMSGDLNIWPEYKNRTIFDITNNLSIMILALRPSDEGTYECVVLKYEKDAFKRVHQAEVTLSVKADFPTPSISDFETPTSNIRRIICSTSGGFPEPHLSWLENGEELNAINTTVSQDPETELYAVSSKLDFNMTTNHSFMCLIKYGHLRVNQTFNWNTTKQEHFPDN

SEQ ID NO: 568 - protein, 208 aa, Artificial Sequence
  CD80 v348 ECD
VIHVTKEVKEVATLSCGHNVSVEELAQTRIYWQKDKKMVLTMMSGDLNIWPEFKNRTIFDITNNLSIMILGLRPSDEGTYECVVLKYEKDAFRRVHLAEVTLSVKADFPTPSISDFETPTSNIRRIICSTSGGFPEPHLSWLENGEELNAINTTVSQDPETELYAVSSKLDFNMTTNHSFMCLIKYGHLRVNQTFNWNTTKQEHFPDN

SEQ ID NO: 569 - protein, 208 aa, Artificial Sequence
  CD80 v349 ECD
VIHVTKEVKEVATLSCGHNVSVEELAQTRIYWQKDKKMVLTMMSGDVKIWPEYKNRTIFDITNNLSIMILGLRPSDEGTYECVVMKYEKDAFKREHLAEVTLSVKADFPTPSISDFETPTSNIRRIICSTSGGFPEPHLSWLENGEELNAINTTVSQDPETELYAVSSKLDFNMTTNHSFMCLIKYGHLRVNQTFNWNTTKQEHFPDN

SEQ ID NO: 570 - protein, 208 aa, Artificial Sequence
  CD80 v350 ECD
VIHVTKEVKEVATLSCGHNVSVEELAQTRIYWQKDKKMVLTMMSGDVKIWPEYKNRTIFDITNNLSIMILALRPSDEGTYECVVMKYEKDAFKREHLAEVTLSVKADFPTPSISDFETPTSNIRRIICSTSGGFPEPHLSWLENGEELNAINTTVSQDPETELYAVSSKLDFNMTTNHSFMCLIKYGHLRVNQTFNWNTTKQEHFPDN

SEQ ID NO: 571 - protein, 208 aa, Artificial Sequence
  CD80 v351 ECD
VIHVTKEVKEVATLSCGHNVSVEELAQTRIYWQKDKKMVLTMMSGDVNIWPEYKNRTIFDITNNLSIMILALRPSDEGTYECVVMKYEKDAFKREHLAEVTLSVKADFPTPSISDFETPTSNIRRIICSTSGGFPEPHLSWLENGEELNAINTTVSQDPETELYAVSSKLDFNMTTNHSFMCLIKYGHLRVNQTFNWNTTKQEHFPDN

SEQ ID NO: 572 - protein, 208 aa, Artificial Sequence
  CD80 v352 ECD
VIHVTKEVKEVATLSCGHNVSVEELAQTRIYWQKDKKMVLTMMSGDVNIWPEYKNRTIFDITNNLSIMILALRPSDEGTYECVVMKDEKDAFKREHLAEVTLSVKADFPTPSISDFETPTSNIRRIICSTSGGFPEPHLSWLENGEELNAINTTVSQDPETELYAVSSKLDFNMTTNHSFMCLIKYGHLRVNQTFNWNTTKQEHFPDN

SEQ ID NO: 573 - protein, 208 aa, Artificial Sequence
  CD80 v353 ECD
VIHVTKEVKEVATLSCGHNVSVEELAQTRIYWQKDKKMVLSMMSGEINIWPEYKNRTIFDITNNLSIMILALRPSDEGTYECVVLKYEKDAFRRVHLAEVTLSVKADFPTPSISDFETPTSNIRRIICSTSGGFPEPHLSWLENGEELNAINTTVSQDPETELYAVSSKLDFNMTTNHSFMCLIKYGHLRVNQTFNWNTTKQEHFPDN

SEQ ID NO: 574 - protein, 208 aa, Artificial Sequence
  CD80 v354 ECD
VIHVTKEVKEVATLSCGYNVSVEELAQTRIYWQKDKKMVLTMMSGEINIWPEYKNRTIFDITNNLSIMILALRPSDEGTYECVVLKYEKDAFKLEHLAEVTLSVKADFPTPSISDFETPTSNIRRIICSTSGGFPEPHLSWLENGEELNAINTTVSQDPETELYAVSSKLDFNMTTNHSFMCLIKYGHLRVNQTFNWNTTKQEHFPDN

SEQ ID NO: 575 - protein, 208 aa, Artificial Sequence
  CD80 v355 ECD
VIHVTKEVKEVATLSCGYNVSVEELAQTRIYWQKDKKIVLTMMSGDLNIWPEYKNRTIFDITNNLSIMILALRPSDEGTYECVVMKYEKDAFKREHLAEVTLSVKADFPTPSISDFETPTSNIRRIICSTSGGFPEPHLSWLENGEELNAINTTVSQDPETELYAVSSKLDFNMTTNHSFMCLIKYGHLRVNQTFNWNTTKQEHFPDN

SEQ ID NO: 576 - protein, 208 aa, Artificial Sequence
  CD80 v356 ECD
VIHVTKEVKEVATLSCGYNVSVEELAQTRIYWQKDKKMVLTMMSGDINIWPEYKNRTIFDITNNLSIMILALRPSDEGTYECVVLKNEKDAFKREHLAEVTLSVKADFPTPSISDFETPTSNIRRIICSTSGGFPEPHLSWLENGEELNAINTTVSQDPETELYAVSSKLDFNMTTNHSFMCLIKYGHLRVNQTFNWNTTKQEHFPDN

SEQ ID NO: 577 - protein, 208 aa, Artificial Sequence
  CD80 v357 ECD
VIHVTKEVKEVATLSCGYNVSVEELAQTRIYWQKDKKMVLTMMSGDLNIWPEYKNRTIFDITNNLSIMILGLRPSDEGTYECVVMKYEKDAFKREHLAEVTLSVKADFPTPSISDFETPTSNIRRIICSTSGGFPEPHLSWLENGEELNAINTTVSQDPETELYAVSSKLDFNMTTNHSFMCLIKYGHLRVNQTFNWNTTKQEHFPDN

SEQ ID NO: 578 - protein, 208 aa, Artificial Sequence
  CD80 v358 ECD
VIHVTKEVKEVATLSCGYNVSVEELAQTRIYWQKDKKMVLTMMSGDLNIWPEYKNRTIFDITNNLSIMILALRPSDEGTYECVVLKYEKDAFKRVHQAEVTLSVKADFPTPSISDFETPTSNIRRIICSTSGGFPEPHLSWLENGEELNAINTTVSQDPETELYAVSSKLDFNMTTNHSFMCLIKYGHLRVNQTFNWNTTKQEHFPDN

SEQ ID NO: 579 - protein, 208 aa, Artificial Sequence
  CD80 v359 ECD
VIHVTKEVKEVATLSCGYNVSVEELAQTRIYWQKDKKMVLTMMSGDLNIWPEFKNRTIFDITNNLSIMILGLRPSDEGTYECVVLKYEKDAFKREHLAEVTLSVKADFPTPSISDFETPTSNIRRIICSTSGGFPEPHLSWLENGEELNAINTTVSQDPETELYAVSSKLDFNMTTNHSFMCLIKYGHLRVNQTFNWNTTKQEHFPDN

SEQ ID NO: 580 - protein, 208 aa, Artificial Sequence
  CD80 v360 ECD
VIHVTKEVKEVATLSCGYNVSVEELAQTRIYWQKDKKMVLTMMSGDLNIWPEFKNRTIFDITNNLSIMILGLRPSDEGTYECVVLKYEKDAFRRVHLAEVTLSVKADFPTPSISDFETPTSNIRRIICSTSGGFPEPHLSWLENGEELNAINTTVSQDPETELYAVSSKLDFNMTTNHSFMCLIKYGHLRVNQTFNWNTTKQEHFPDN

SEQ ID NO: 581 - protein, 208 aa, Artificial Sequence
  CD80 v361 ECD
VIHVTKEVKEVATLSCGYNVSVEELAQTRIYWQKDKKMVLTMMSGDVNIWPEYKNRTIFDITNNLSIMILALRPSDEGTYECVVMKYEKDAFKREHLAEVTLSVKADFPTPSISDFETPTSNIRRIICSTSGGFPEPHLSWLENGEELNAINTTVSQDPETELYAVSSKLDFNMTTNHSFMCLIKYGHLRVNQTFNWNTTKQEHFPDN

SEQ ID NO: 582 - protein, 208 aa, Artificial Sequence
  CD80 v362 ECD
VIHVTKEVKEVATLSCGYNVSVEELAQTRIYWQKDKKMVLTMMSGDMNIWPEYKNRTIFDITNNLSIMILGLRPSDEGTYECVVLKYEKDAFKQVHLAEVTLSVKADFPTPSISDFETPTSNIRRIICSTSGGFPEPHLSWLENGEELNAINTTVSQDPETELYAVSSKLDFNMTTNHSFMCLIKYGHLRVNQTFNWNTTKQEHFPDN

SEQ ID NO: 583 - protein, 208 aa, Artificial Sequence
  CD80 v363 ECD
VIHVTKEVKEVATLSCGYNVSVEELAQTRIYWQKDKKMVLTMMSGDMNIWPEYKNRTIFDITNNLSIMILALRPSDEGTYECVVMKYEKDAFKQEHLAEVTLSVKADFPTPSISDFETPTSNIRRIICSTSGGFPEPHLSWLENGEELNAINTTVSQDPETELYAVSSKLDFNMTTNHSFMCLIKYGHLRVNQTFNWNTTKQEHFPDN

SEQ ID NO: 584 - protein, 208 aa, Artificial Sequence
  CD80 v364 ECD
VIHVTKEVKEVATLSCGYNVSVEELAQTRIYWQKDKKMVLTMMSGDMNIWPEYKNRTIFDITNNLSIMILALRPSDEGMYECVVMKYEKDAFKREHLAEVTLSVKADFPTPSISDFETPTSNIRRIICSTSGGFPEPHLSWLENGEELNAINTTVSQDPETELYAVSSKLDFNMTTNHSFMCLIKYGHLRVNQTFNWNTTKQEHFPDN

SEQ ID NO: 585 - protein, 208 aa, Artificial Sequence
  CD80 v365 ECD
VIHVTKEVKEVATLSCGYNVSDEELAQTRIYWQKDKKMVLTMMSGDVKIWPEYKNRTIFDITNNLSIMILALRPSDEGTYECVVLKYEKDAFKREHLAEVTLSVKADFPTPSISDFETPTSNIRRIICSTSGGFPEPHLSWLENGEELNAINTTVSQDPETELYAVSSKLDFNMTTNHSFMCLIKYGHLRVNQTFNWNTTKQEHFPDN

SEQ ID NO: 586 - protein, 208 aa, Artificial Sequence
  CD80 v366 ECD
VIHVTKEVKEVATLSCGHNVSVEELALTRIYWLKDKKMVLSMMSGDVKIWPEYKNRTIFDITNNLSIMILALRPSDEGTYECVVMKYEKDAFKREHLAEVTLSVKADFPTPSISDFETPTSNIRRIICSTSGGFPEPHLSWLENGEELNAINTTVSQDPETELYAVSSKLDFNMTTNHSFMCLIKYGHLRVNQTFNWNTTKQEHFPDN

SEQ ID NO: 587 - protein, 208 aa, Artificial Sequence
  CD80 v367 ECD
VIHVTKEVKEVATLSCGHNVSVEELAQTRIYWLKDKKMVLTMMSGDVNIWPEYKNRTIFDISNNLSIMILALRPSDEGTYECVVMKYEKDAFKREHLAEVTLSVKADFPTPSISDFETPTSNIRRIICSTSGGFPEPHLSWLENGEELNAINTTVSQDPETELYAVSSKLDFNMTTNHSFMCLIKYGHLRVNQTFNWNTTKQEHFPDN

SEQ ID NO: 588 - protein, 208 aa, Artificial Sequence
  CD80 v368 ECD
VIHVTKEVKEVATLSCGHNVSVEELAQTRIYWRKDKKIVLTMMSGDLNIWPEYKNRTIFDITNNLSIMILALRPSDEGTYECVVLKYEKDAFKREHLAEVTLSVKADFPTPSISDFETPTSNIRRIICSTSGGFPEPHLSWLENGEELNAINTTVSQDPETELYAVSSKLDFNMTTNHSFMCLIKYGHLRVNQTFNWNTTKQEHFPDN

SEQ ID NO: 589 - protein, 208 aa, Artificial Sequence
  CD80 v369 ECD
VIHVTKEVKEVATLSCGHNVSVEELAQTCIYWQKDKKMVLTMMSGDLNIWPEYKNRTIFDITNNLSIMILGLRPSDEGTYECVVMKYEKDAFKREHLAEVTLSVKADFPTPSISDFETPTSNIRRIICSTSGGFPEPHLSWLENGEELNAINTTVSQDPETELYAVSSKLDFNMTTNHSFMCLIKYGHLRVNQTFNWNTTKQEHFPDN

SEQ ID NO: 590 - protein, 208 aa, Artificial Sequence
  CD80 v370 ECD
VIHVTKEVKEVATLSCGHNVPVEELAQTRIYWQKDKEMVLTMMSGEINIWPEYKNRTIFDITNNLSIMILALRPSDEGTYECVVLKYEKDAFKREHLAEVTLSVKADFPTPSISDFETPTSNIRRIICSTSGGFPEPHLSWLENGEELNAINTTVSQDPETELYAVSSKLDFNMTTNHSFMCLIKYGHLRVNQTFNWNTTKQEHFPDN

SEQ ID NO: 591 - protein, 208 aa, Artificial Sequence
  CD80 v371 ECD
VIHVTKEVKEVATLSCGHNVPVEELAQTRIYWQKDKEMVLTMMSGEINIWPEYKNRTIFDITNNLSIMILALRPSDEGTYECVVLKYEKDAFKLEHLAEVTLSVKADFPTPSISDFETPTSNIRRIICSTSGGFPEPHLSWLENGEELNAINTTVSQDPETELYAVSSKLDFNMTTNHSFMCLIKYGHLRVNQTFNWNTTKQEHFPDN

SEQ ID NO: 592 - protein, 208 aa, Artificial Sequence
  CD80 v372 ECD
VIHVTKEVKEVARLSCGHNVSVEELAQTRIYWQKDKKMVLTMMSGDLNIWPEYKNRTIFDITNNLSIMILALRPSDEGTYECVVLKYEKDAFKREHLAEVTLSVKADFPTPSISDFETPTSNIRRIICSTSGGFPEPHLSWLENGEELNAINTTVSQDPETELYAVSSKLDFNMTTNHSFMCLIKYGHLRVNQTFNWNTTKQEHFPDN

SEQ ID NO: 593 - protein, 208 aa, Artificial Sequence
  CD80 v373 ECD
VIHVTKEVKEVARLSCGYNVSVEELAQTRIYWQKDKKMVLTMMSGDMNIWPEYKNRTIFDITNNLSIMILALRPSDEGTYECVVMKYEKDAFKQEHLAEVTLSVKADFPTPSISDFETPTSNIRRIICSTSGGFPEPHLSWLENGEELNAINTTVSQDPETELYAVSSKLDFNMTTNHSFMCLIKYGHLRVNQTFNWNTTKQEHFPDN

SEQ ID NO: 594 - protein, 208 aa, Artificial Sequence
  CD80 v374 ECD
VIHVTKEVKEVARLSCGHNVSVEELALTRIYWLKDKKMVLSMMSGDVKIWPEYKNRTIFDITNNLSIMILALRPSDEGTYECVVMKYEKDAFKREHLAEVTLSVKADFPTPSISDFETPTSNIRRIICSTSGGFPEPHLSWLENGEELNAINTTVSQDPETELYAVSSKLDFNMTTNHSFMCLIKYGHLRVNQTFNWNTTKQEHFPDN

SEQ ID NO: 595 - protein, 208 aa, Artificial Sequence
  CD80 v375 ECD
VIHVTKEVKEVARLSCGHNVSVEELAQTRIYWLKDKKMVLTMMSGDLNIWPEYKNRTIFDITNNLSIMILALRPSDEGTYECVVMKYEKDAFKREHLAEVTLSVKADFPTPSISDFETPTSNIRRIICSTSGGFPEPHLSWLENGEELNAINTTVSQDPETELYAVSSKLDFNMTTNHSFMCLIKYGHLRVNQTFNWNTTKQEHFPDN

SEQ ID NO: 596 - protein, 208 aa, Artificial Sequence
  CD80 v376 ECD
VIHVTKEVKEVARLSCGHNVSVEELAQTRIYWLKDKKMVLTMMSGDVNIWPEYKNRTIFDISNNLSIMILALRPSDEGTYECVVMKYEKDAFKREHLAEVTLSVKADFPTPSISDFETPTSNIRRIICSTSGGFPEPHLSWLENGEELNAINTTVSQDPETELYAVSSKLDFNMTTNHSFMCLIKYGHLRVNQTFNWNTTKQEHFPDN

SEQ ID NO: 597 - protein, 208 aa, Artificial Sequence
  CD80 v377 ECD
VIHVTKEVKEVARLSCGHNVSVEELAQTRIYWRKDKKIVLTMMSGDLNIWPEYKNRTIFDITNNLSIMILALRPSDEGTYECVVLKYEKDAFKREHLAEVTLSVKADFPTPSISDFETPTSNIRRIICSTSGGFPEPHLSWLENGEELNAINTTVSQDPETELYAVSSKLDFNMTTNHSFMCLIKYGHLRVNQTFNWNTTKQEHFPDN

SEQ ID NO: 598 - protein, 208 aa, Artificial Sequence
  CD80 v378 ECD
VIHVTKEVKEVARLSCGHNVSVEELAQTRIYWRKDKKIVLTMMSGDLNIWPEYKNRTIFDITNNLSIMILALRPSDEGTYECVVLKYEKDAFKRVHQAEVTLSVKADFPTPSISDFETPTSNIRRIICSTSGGFPEPHLSWLENGEELNAINTTVSQDPETELYAVSSKLDFNMTTNHSFMCLIKYGHLRVNQTFNWNTTKQEHFPDN

SEQ ID NO: 599 - protein, 208 aa, Artificial Sequence
  CD80 v379 ECD
VIHVTKEVKEVARLSCGHNVSVEELAQTRIYWRKDKKIVLTMMSGDLNIWPEYKNRTIFDITNNLSIMILALRPSDEGTYECVVMKYEKDAFKREHLAEVTLSVKADFPTPSISDFETPTSNIRRIICSTSGGFPEPHLSWLENGEELNAINTTVSQDPETELYAVSSKLDFNMTTNHSFMCLIKYGHLRVNQTFNWNTTKQEHFPDN

SEQ ID NO: 600 - protein, 208 aa, Artificial Sequence
  CD80 v380 ECD
VIHVTKEVKEVARLSCGHNVSVEELAQTRIYWRKDKKIVLTMMSGDLNIWPEYKNRTIFDITNNLSIMILALRPSDEGTYECVVMKYEKDAFKQEHLAEVTLSVKADFPTPSISDFETPTSNIRRIICSTSGGFPEPHLSWLENGEELNAINTTVSQDPETELYAVSSKLDFNMTTNHSFMCLIKYGHLRVNQTFNWNTTKQEHFPDN

SEQ ID NO: 601 - protein, 208 aa, Artificial Sequence
  CD80 v381 ECD
VIHVTKEVKEVARLSCGHNVSVEELAQTRIYWRKDKKMVLTMMSGDLNIWPEYKNRTIFDITNNLSIMILALRPSDEGTYECVVLKYEKDAFKREHLAEVTLSVKADFPTPSISDFETPTSNIRRIICSTSGGFPEPHLSWLENGEELNAINTTVSQDPETELYAVSSKLDFNMTTNHSFMCLIKYGHLRVNQTFNWNTTKQEHFPDN

SEQ ID NO: 602 - protein, 208 aa, Artificial Sequence
  CD80 v382 ECD
VIHVTKEVKEVARLSCGHNVSVEELAQTRIYWRKDKKMVLTMMSGDLNIWPEYKNRTIFDITNNLSIMILALRPSDEGTYECVVMKYEKDAFKREHLAEVTLSVKADFPTPSISDFETPTSNIRRIICSTSGGFPEPHLSWLENGEELNAINTTVSQDPETELYAVSSKLDFNMTTNHSFMCLIKYGHLRVNQTFNWNTTKQEHFPDN

SEQ ID NO: 603 - protein, 208 aa, Artificial Sequence
  CD80 v383 ECD
VIHVTKEVKEVATLSCGHNVSDEDLAQTRIYWQKDKKMVLTMMSGDLNIWPEYKNRTIFDITNNLSIMILALRPSDEGTYECVVLKYEKDAFKREHLAEVTLSVKADFPTPSISDFETPTSNIRRIICSTSGGFPEPHLSWLENGEELNAINTTVSQDPETELYAVSSKLDFNMTTNHSFMCLIKYGHLRVNQTFNWNTTKQEHFPDN

SEQ ID NO: 604 - protein, 208 aa, Artificial Sequence
  CD80 v384 ECD
VIHVTKEVKEVATLSCGHNVSDEDLAQTRIYWQKDKKMVLTMMSGDLNIWPEYKNRTIFDITNNLSIMILALRPSDEGTYECVVMKYEKGAFKREHLAEVTLSVKADFPTPSISDFETPTSNIRRIICSTSGGFPEPHLSWLENGEELNAINTTVSQDPETELYAVSSKLDFNMTTNHSFMCLIKYGHLRVNQTFNWNTTKQEHFPDN

SEQ ID NO: 605 - protein, 208 aa, Artificial Sequence
  CD80 v385 ECD
VIHVTKEVKEVATLSCGHNVSDEDLAQTRIYWQKDKKMVLTMMSGDVNIWPEYKNRTIFDITNNLSIMILALRPSDEGTYECVVLKYEKDAFKREHLAEVTLSVKADFPTPSISDFETPTSNIRRIICSTSGGFPEPHLSWLENGEELNAINTTVSQDPETELYAVSSKLDFNMTTNHSFMCLIKYGHLRVNQTFNWNTTKQEHFPDN

SEQ ID NO: 606 - protein, 208 aa, Artificial Sequence
  CD80 v386 ECD
VIHVTKEVKEVATLSCGHNVSVEELAQTRIYWQKEKKMVLTMMSGVMNIWPEYKNRTIFDITNNLSIVILALRPSDEGTYECVVLKYEKDAFKREHLAEVTLSVKADFPTPSISDFETPTSNIRRIICSTSGGFPEPHLSWLENGEELNAINTTVSQDPETELYAVSSKLDFNMTTNHSFMCLIKYGHLRVNQTFNWNTTKQEHFPDN

SEQ ID NO: 607 - protein, 208 aa, Artificial Sequence
  CD80 v387 ECD
VIHVTKEVKEVATLSCGHNVSVEELAQTRIYWQKEKKMVLTMMSGDLNIWPEYKNRTIFDITNNLSIVILALRPSDEGTYECVVLKYEKDAFKREHLAEVTLSVKADFPTPSISDFETPTSNIRRIICSTSGGFPEPHLSWLENGEELNAINTTVSQDPETELYAVSSKLDFNMTTNHSFMCLIKYGHLRVNQTFNWNTTKQEHFPDN

SEQ ID NO: 608 - protein, 208 aa, Artificial Sequence
  CD80 v388 ECD
VIHVTKEVKEVATLSCGHNVSVEELAQTRIYWQKEKKMVLTMMSGDMNIWPEYKNRTIFDITNNLSIMILALRPSDEGTYECVVLKYEKDAFKREHLAEVTLSVKADFPTPSISDFETPTSNIRRIICSTSGGFPEPHLSWLENGEELNAINTTVSQDPETELYAVSSKLDFNMTTNHSFMCLIKYGHLRVNQTFNWNTTKQEHFPDN

SEQ ID NO: 609 - protein, 208 aa, Artificial Sequence
  CD80 v389 ECD
VIHVTKEVKEVATLSCGHNVSVEELAQTRIYWQKEKKMVLTMMSGDMNIWPEYKNRTIFDITNNLSIVILALRPSDEGTYECVVQKYEKDAFKREHLAEVTLSVKADFPTPSISDFETPTSNIRRIICSTSGGFPEPHLSWLENGEELNAINTTVSQDPETELYAVSSKLDFNMTTNHSFMCLIKYGHLRVNQTFNWNTTKQEHFPDN

SEQ ID NO: 610 - protein, 208 aa, Artificial Sequence
  CD80 v390 ECD
VIHVTKEVKEVATLSCGHNVSVEELAQTRIYWQKDKKMVLTMMSGVMNIWPEYKNRTIFDITNNLSIVILALRPSDEGTYECVVLKYEKDAFKREHLAEVTLSVKADFPTPSISDFETPTSNIRRIICSTSGGFPEPHLSWLENGEELNAINTTVSQDPETELYAVSSKLDFNMTTNHSFMCLIKYGHLRVNQTFNWNTTKQEHFPDN

SEQ ID NO: 611 - protein, 208 aa, Artificial Sequence
  CD80 v392 ECD
VIHVTKEVKEVATLSCGHNVSVEELAQTRIYWQKDKKMVLTMMSGDMNIWPEYKNRTIFDITNNLSIMILALRPSDEGTYECVVLKYEKDAFKREHLAEVTLSVKADFPTPSISDFETPTSNIRRIICSTSGGFPEPHLSWLENGEELNAINTTVSQDPETELYAVSSKLDFNMTTNHSFMCLIKYGHLRVNQTFNWNTTKQEHFPDN

SEQ ID NO: 612 - protein, 208 aa, Artificial Sequence
  CD80 v393 ECD
VIHVTKEVKEVATLSCGHNVSVEELAQTRIYWQKDKKMVLTMMSGDMNIWPEYKNRTIFDITNNLSIVILALRPSDEGTYECVVQKYEKDAFKREHLAEVTLSVKADFPTPSISDFETPTSNIRRIICSTSGGFPEPHLSWLENGEELNAINTTVSQDPETELYAVSSKLDFNMTTNHSFMCLIKYGHLRVNQTFNWNTTKQEHFPDN

SEQ ID NO: 613 - protein, 208 aa, Artificial Sequence
  CD80 v394 ECD
VIHVTKEVKEVATLSCGHNVSVEELAQTRIYWQKEKKMVLTMMSGVLNIWPEYKNRTIFDITNNLSIVILALRPSDEGTYECVVLKYEKDAFKREHLAEVTLSVKADFPTPSISDFETPTSNIRRIICSTSGGFPEPHLSWLENGEELNAINTTVSQDPETELYAVSSKLDFNMTTNHSFMCLIKYGHLRVNQTFNWNTTKQEHFPDN

SEQ ID NO: 614 - protein, 208 aa, Artificial Sequence
  CD80 v395 ECD
VIHVTKEVKEVATLSCGHNVSVEELAQTRIYWQKEKKMVLTMMSGVMNIWPEYKNRTIFDITNNLSIMILALRPSDEGTYECVVLKYEKDAFKREHLAEVTLSVKADFPTPSISDFETPTSNIRRIICSTSGGFPEPHLSWLENGEELNAINTTVSQDPETELYAVSSKLDFNMTTNHSFMCLIKYGHLRVNQTFNWNTTKQEHFPDN

SEQ ID NO: 615 - protein, 208 aa, Artificial Sequence
  CD80 v396 ECD
VIHVTKEVKEVATLSCGHNVSVEELAQTRIYWQKEKKMVLTMMSGVMNIWPEYKNRTIFDITNNLSIVILALRPSDEGTYECVVQKYEKDAFKREHLAEVTLSVKADFPTPSISDFETPTSNIRRIICSTSGGFPEPHLSWLENGEELNAINTTVSQDPETELYAVSSKLDFNMTTNHSFMCLIKYGHLRVNQTFNWNTTKQEHFPDN

SEQ ID NO: 616 - protein, 208 aa, Artificial Sequence
  CD80 v397 ECD
VIHVTKEVKEVATLSCGHNVSVEELAQTRIYWQKEKKMVLTMMSGDLNIWPEYKNRTIFDITNNLSIMILALRPSDEGTYECVVLKYEKDAFKREHLAEVTLSVKADFPTPSISDFETPTSNIRRIICSTSGGFPEPHLSWLENGEELNAINTTVSQDPETELYAVSSKLDFNMTTNHSFMCLIKYGHLRVNQTFNWNTTKQEHFPDN

SEQ ID NO: 617 - protein, 208 aa, Artificial Sequence
  CD80 v398 ECD
VIHVTKEVKEVATLSCGHNVSVEELAQTRIYWQKEKKMVLTMMSGDLNIWPEYKNRTIFDITNNLSIVILALRPSDEGTYECVVQKYEKDAFKREHLAEVTLSVKADFPTPSISDFETPTSNIRRIICSTSGGFPEPHLSWLENGEELNAINTTVSQDPETELYAVSSKLDFNMTTNHSFMCLIKYGHLRVNQTFNWNTTKQEHFPDN

SEQ ID NO: 618 - protein, 208 aa, Artificial Sequence
  CD80 v399 ECD
VIHVTKEVKEVATLSCGHNVSVEELAQTRIYWQKEKKMVLTMMSGDMNIWPEYKNRTIFDITNNLSIMILALRPSDEGTYECVVQKYEKDAFKREHLAEVTLSVKADFPTPSISDFETPTSNIRRIICSTSGGFPEPHLSWLENGEELNAINTTVSQDPETELYAVSSKLDFNMTTNHSFMCLIKYGHLRVNQTFNWNTTKQEHFPDN

SEQ ID NO: 619 - protein, 208 aa, Artificial Sequence
  CD80 v400 ECD
VIHVTKEVKEVATLSCGHNVSVEELAQTRIYWQKDKKMVLTMMSGVLNIWPEYKNRTIFDITNNLSIVILALRPSDEGTYECVVLKYEKDAFKREHLAEVTLSVKADFPTPSISDFETPTSNIRRIICSTSGGFPEPHLSWLENGEELNAINTTVSQDPETELYAVSSKLDFNMTTNHSFMCLIKYGHLRVNQTFNWNTTKQEHFPDN

SEQ ID NO: 620 - protein, 208 aa, Artificial Sequence
  CD80 v401 ECD
VIHVTKEVKEVATLSCGHNVSVEELAQTRIYWQKDKKMVLTMMSGVMNIWPEYKNRTIFDITNNLSIMILALRPSDEGTYECVVLKYEKDAFKREHLAEVTLSVKADFPTPSISDFETPTSNIRRIICSTSGGFPEPHLSWLENGEELNAINTTVSQDPETELYAVSSKLDFNMTTNHSFMCLIKYGHLRVNQTFNWNTTKQEHFPDN

SEQ ID NO: 621 - protein, 208 aa, Artificial Sequence; identical to SEQ ID NO: 55
  CD80 v402 ECD

SEQ ID NO: 622 - protein, 208 aa, Artificial Sequence
  CD80 v403 ECD
VIHVTKEVKEVATLSCGHNVSVEELAQTRIYWQKDKKMVLTMMSGDMNIWPEYKNRTIFDITNNLSIMILALRPSDEGTYECVVQKYEKDAFKREHLAEVTLSVKADFPTPSISDFETPTSNIRRIICSTSGGFPEPHLSWLENGEELNAINTTVSQDPETELYAVSSKLDFNMTTNHSFMCLIKYGHLRVNQTFNWNTTKQEHFPDN

SEQ ID NO: 623 - protein, 208 aa, Artificial Sequence
  CD80 v404 ECD
VIHVTKEVKEVATLSCGHNVSVEELAQTRIYWQKEKKMVLTMMSGVLNIWPEYKNRTIFDITNNLSIMILALRPSDEGTYECVVLKYEKDAFKREHLAEVTLSVKADFPTPSISDFETPTSNIRRIICSTSGGFPEPHLSWLENGEELNAINTTVSQDPETELYAVSSKLDFNMTTNHSFMCLIKYGHLRVNQTFNWNTTKQEHFPDN

SEQ ID NO: 624 - protein, 208 aa, Artificial Sequence
  CD80 v405 ECD
VIHVTKEVKEVATLSCGHNVSVEELAQTRIYWQKEKKMVLTMMSGVLNIWPEYKNRTIFDITNNLSIVILALRPSDEGTYECVVQKYEKDAFKREHLAEVTLSVKADFPTPSISDFETPTSNIRRIICSTSGGFPEPHLSWLENGEELNAINTTVSQDPETELYAVSSKLDFNMTTNHSFMCLIKYGHLRVNQTFNWNTTKQEHFPDN

SEQ ID NO: 625 - protein, 208 aa, Artificial Sequence
  CD80 v406 ECD
VIHVTKEVKEVATLSCGHNVSVEELAQTRIYWQKEKKMVLTMMSGVMNIWPEYKNRTIFDITNNLSIMILALRPSDEGTYECVVQKYEKDAFKREHLAEVTLSVKADFPTPSISDFETPTSNIRRIICSTSGGFPEPHLSWLENGEELNAINTTVSQDPETELYAVSSKLDFNMTTNHSFMCLIKYGHLRVNQTFNWNTTKQEHFPDN

SEQ ID NO: 626 - protein, 208 aa, Artificial Sequence
  CD80 v407 ECD
VIHVTKEVKEVATLSCGHNVSVEELAQTRIYWQKEKKMVLTMMSGDLNIWPEYKNRTIFDITNNLSIMILALRPSDEGTYECVVQKYEKDAFKREHLAEVTLSVKADFPTPSISDFETPTSNIRRIICSTSGGFPEPHLSWLENGEELNAINTTVSQDPETELYAVSSKLDFNMTTNHSFMCLIKYGHLRVNQTFNWNTTKQEHFPDN

SEQ ID NO: 627 - protein, 208 aa, Artificial Sequence
  CD80 v408 ECD
VIHVTKEVKEVATLSCGHNVSVEELAQTRIYWQKDKKMVLTMMSGVLNIWPEYKNRTIFDITNNLSIVILALRPSDEGTYECVVQKYEKDAFKREHLAEVTLSVKADFPTPSISDFETPTSNIRRIICSTSGGFPEPHLSWLENGEELNAINTTVSQDPETELYAVSSKLDFNMTTNHSFMCLIKYGHLRVNQTFNWNTTKQEHFPDN

SEQ ID NO: 628 - protein, 208 aa, Artificial Sequence
  CD80 v409 ECD
VIHVTKEVKEVATLSCGHNVSVEELAQTRIYWQKDKKMVLTMMSGVMNIWPEYKNRTIFDITNNLSIMILALRPSDEGTYECVVQKYEKDAFKREHLAEVTLSVKADFPTPSISDFETPTSNIRRIICSTSGGFPEPHLSWLENGEELNAINTTVSQDPETELYAVSSKLDFNMTTNHSFMCLIKYGHLRVNQTFNWNTTKQEHFPDN

SEQ ID NO: 629 - protein, 208 aa, Artificial Sequence
  CD80 v410 ECD
VIHVTKEVKEVATLSCGHNVSVEELAQTRIYWQKDKKMVLTMMSGDLNIWPEYKNRTIFDITNNLSIMILALRPSDEGTYECVVQKYEKDAFKREHLAEVTLSVKADFPTPSISDFETPTSNIRRIICSTSGGFPEPHLSWLENGEELNAINTTVSQDPETELYAVSSKLDFNMTTNHSFMCLIKYGHLRVNQTFNWNTTKQEHFPDN

SEQ ID NO: 630 - protein, 208 aa, Artificial Sequence
  CD80 v411 ECD
VIHVTKEVKEVATLSCGHNVSVEELAQTRIYWQKEKKMVLTMMSGVLNIWPEYKNRTIFDITNNLSIMILALRPSDEGTYECVVQKYEKDAFKREHLAEVTLSVKADFPTPSISDFETPTSNIRRIICSTSGGFPEPHLSWLENGEELNAINTTVSQDPETELYAVSSKLDFNMTTNHSFMCLIKYGHLRVNQTFNWNTTKQEHFPDN

SEQ ID NO: 631 - protein, 208 aa, Artificial Sequence
  CD80 v412 ECD
VIHVTKEVKEVATLSCGHNVSVEELAQTRIYWQKEKKMVLTMMSGDVNIWPEYKNRTIFDITNNLSIVILALRPSDEGTYECVVLKYEKDAFKREHLAEVTLSVKADFPTPSISDFETPTSNIRRIICSTSGGFPEPHLSWLENGEELNAINTTVSQDPETELYAVSSKLDFNMTTNHSFMCLIKYGHLRVNQTFNWNTTKQEHFPDN

SEQ ID NO: 632 - protein, 208 aa, Artificial Sequence
  CD80 v413 ECD
VIHVTKEVKEVATLSCGHNVSVEELAQTRIYWQKEKKMVLTMMSGDMKIWPEYKNRTIFDITNNLSIVILALRPSDEGTYECVVLKYEKDAFKREHLAEVTLSVKADFPTPSISDFETPTSNIRRIICSTSGGFPEPHLSWLENGEELNAINTTVSQDPETELYAVSSKLDFNMTTNHSFMCLIKYGHLRVNQTFNWNTTKQEHFPDN

SEQ ID NO: 633 - protein, 208 aa, Artificial Sequence
  CD80 v414 ECD
VIHVTKEVKEVATLSCGHNVSVEELAQTRIYWQKEKKMVLTMMSGDMNIWPEYKNRTIFDITNNLSIVILALRPSDEGTYECVVLKYENDAFKREHLAEVTLSVKADFPTPSISDFETPTSNIRRIICSTSGGFPEPHLSWLENGEELNAINTTVSQDPETELYAVSSKLDFNMTTNHSFMCLIKYGHLRVNQTFNWNTTKQEHFPDN

SEQ ID NO: 634 - protein, 208 aa, Artificial Sequence
  CD80 v415 ECD
VIHVTKEVKEVATLSCGHNVSVEELAQTRIYWQKDKKMVLTMMSGDMKIWPEYKNRTIFDITNNLSIVILALRPSDEGTYECVVLKYEKDAFKREHLAEVTLSVKADFPTPSISDFETPTSNIRRIICSTSGGFPEPHLSWLENGEELNAINTTVSQDPETELYAVSSKLDFNMTTNHSFMCLIKYGHLRVNQTFNWNTTKQEHFPDN

SEQ ID NO: 635 - protein, 208 aa, Artificial Sequence
  CD80 v416 ECD
VIHVTKEVKEVATLSCGHNVSVEELAQTRIYWQKDKKMVLTMMSGDMNIWPEYKNRTIFDITNNLSIVILALRPSDEGTYECVVLKYENDAFKREHLAEVTLSVKADFPTPSISDFETPTSNIRRIICSTSGGFPEPHLSWLENGEELNAINTTVSQDPETELYAVSSKLDFNMTTNHSFMCLIKYGHLRVNQTFNWNTTKQEHFPDN

SEQ ID NO: 636 - protein, 208 aa, Artificial Sequence
  CD80 v417 ECD
VIHVTKEVKEVATLSCGHNVSVEELAQTRIYWQKEKKMVLTMMSGDVKIWPEYKNRTIFDITNNLSIVILALRPSDEGTYECVVLKYEKDAFKREHLAEVTLSVKADFPTPSISDFETPTSNIRRIICSTSGGFPEPHLSWLENGEELNAINTTVSQDPETELYAVSSKLDFNMTTNHSFMCLIKYGHLRVNQTFNWNTTKQEHFPDN

SEQ ID NO: 637 - protein, 208 aa, Artificial Sequence
  CD80 v418 ECD
VIHVTKEVKEVATLSCGHNVSVEELAQTRIYWQKEKKMVLTMMSGDVNIWPEYKNRTIFDITNNLSIMILALRPSDEGTYECVVLKYEKDAFKREHLAEVTLSVKADFPTPSISDFETPTSNIRRIICSTSGGFPEPHLSWLENGEELNAINTTVSQDPETELYAVSSKLDFNMTTNHSFMCLIKYGHLRVNQTFNWNTTKQEHFPDN

SEQ ID NO: 638 - protein, 208 aa, Artificial Sequence
  CD80 v419 ECD
VIHVTKEVKEVATLSCGHNVSVEELAQTRIYWQKEKKMVLTMMSGDVNIWPEYKNRTIFDITNNLSIVILALRPSDEGTYECVVLKYENDAFKREHLAEVTLSVKADFPTPSISDFETPTSNIRRIICSTSGGFPEPHLSWLENGEELNAINTTVSQDPETELYAVSSKLDFNMTTNHSFMCLIKYGHLRVNQTFNWNTTKQEHFPDN

SEQ ID NO: 639 - protein, 208 aa, Artificial Sequence
  CD80 v420 ECD
VIHVTKEVKEVATLSCGHNVSVEELAQTRIYWQKEKKMVLTMMSGDMKIWPEYKNRTIFDITNNLSIMILALRPSDEGTYECVVLKYEKDAFKREHLAEVTLSVKADFPTPSISDFETPTSNIRRIICSTSGGFPEPHLSWLENGEELNAINTTVSQDPETELYAVSSKLDFNMTTNHSFMCLIKYGHLRVNQTFNWNTTKQEHFPDN

SEQ ID NO: 640 - protein, 208 aa, Artificial Sequence
  CD80 v421 ECD
VIHVTKEVKEVATLSCGHNVSVEELAQTRIYWQKEKKMVLTMMSGDMKIWPEYKNRTIFDITNNLSIVILALRPSDEGTYECVVLKYENDAFKREHLAEVTLSVKADFPTPSISDFETPTSNIRRIICSTSGGFPEPHLSWLENGEELNAINTTVSQDPETELYAVSSKLDFNMTTNHSFMCLIKYGHLRVNQTFNWNTTKQEHFPDN

SEQ ID NO: 641 - protein, 208 aa, Artificial Sequence
  CD80 v422 ECD
VIHVTKEVKEVATLSCGHNVSVEELAQTRIYWQKEKKMVLTMMSGDMNIWPEYKNRTIFDITNNLSIMILALRPSDEGTYECVVLKYENDAFKREHLAEVTLSVKADFPTPSISDFETPTSNIRRIICSTSGGFPEPHLSWLENGEELNAINTTVSQDPETELYAVSSKLDFNMTTNHSFMCLIKYGHLRVNQTFNWNTTKQEHFPDN

SEQ ID NO: 642 - protein, 208 aa, Artificial Sequence
  CD80 v423 ECD
VIHVTKEVKEVATLSCGHNVSVEELAQTRIYWQKDKKMVLTMMSGDVKIWPEYKNRTIFDITNNLSIVILALRPSDEGTYECVVLKYEKDAFKREHLAEVTLSVKADFPTPSISDFETPTSNIRRIICSTSGGFPEPHLSWLENGEELNAINTTVSQDPETELYAVSSKLDFNMTTNHSFMCLIKYGHLRVNQTFNWNTTKQEHFPDN

SEQ ID NO: 643 - protein, 208 aa, Artificial Sequence
  CD80 v424 ECD
VIHVTKEVKEVATLSCGHNVSVEELAQTRIYWQKDKKMVLTMMSGDVNIWPEYKNRTIFDITNNLSIMILALRPSDEGTYECVVLKYEKDAFKREHLAEVTLSVKADFPTPSISDFETPTSNIRRIICSTSGGFPEPHLSWLENGEELNAINTTVSQDPETELYAVSSKLDFNMTTNHSFMCLIKYGHLRVNQTFNWNTTKQEHFPDN

SEQ ID NO: 644 - protein, 208 aa, Artificial Sequence
  CD80 v425 ECD
VIHVTKEVKEVATLSCGHNVSVEELAQTRIYWQKDKKMVLTMMSGDVNIWPEYKNRTIFDITNNLSIVILALRPSDEGTYECVVLKYENDAFKREHLAEVTLSVKADFPTPSISDFETPTSNIRRIICSTSGGFPEPHLSWLENGEELNAINTTVSQDPETELYAVSSKLDFNMTTNHSFMCLIKYGHLRVNQTFNWNTTKQEHFPDN

SEQ ID NO: 645 - protein, 208 aa, Artificial Sequence
  CD80 v426 ECD
VIHVTKEVKEVATLSCGHNVSVEELAQTRIYWQKDKKMVLTMMSGDMKIWPEYKNRTIFDITNNLSIMILALRPSDEGTYECVVLKYEKDAFKREHLAEVTLSVKADFPTPSISDFETPTSNIRRIICSTSGGFPEPHLSWLENGEELNAINTTVSQDPETELYAVSSKLDFNMTTNHSFMCLIKYGHLRVNQTFNWNTTKQEHFPDN

SEQ ID NO: 646 - protein, 208 aa, Artificial Sequence
  CD80 v427 ECD
VIHVTKEVKEVATLSCGHNVSVEELAQTRIYWQKDKKMVLTMMSGDMKIWPEYKNRTIFDITNNLSIVILALRPSDEGTYECVVLKYENDAFKREHLAEVTLSVKADFPTPSISDFETPTSNIRRIICSTSGGFPEPHLSWLENGEELNAINTTVSQDPETELYAVSSKLDFNMTTNHSFMCLIKYGHLRVNQTFNWNTTKQEHFPDN

SEQ ID NO: 647 - protein, 208 aa, Artificial Sequence
  CD80 v428 ECD
VIHVTKEVKEVATLSCGHNVSVEELAQTRIYWQKDKKMVLTMMSGDMNIWPEYKNRTIFDITNNLSIMILALRPSDEGTYECVVLKYENDAFKREHLAEVTLSVKADFPTPSISDFETPTSNIRRIICSTSGGFPEPHLSWLENGEELNAINTTVSQDPETELYAVSSKLDFNMTTNHSFMCLIKYGHLRVNQTFNWNTTKQEHFPDN

SEQ ID NO: 648 - protein, 208 aa, Artificial Sequence
  CD80 v429 ECD
VIHVTKEVKEVATLSCGHNVSVEELAQTRIYWQKEKKMVLTMMSGDVKIWPEYKNRTIFDITNNLSIMILALRPSDEGTYECVVLKYEKDAFKREHLAEVTLSVKADFPTPSISDFETPTSNIRRIICSTSGGFPEPHLSWLENGEELNAINTTVSQDPETELYAVSSKLDFNMTTNHSFMCLIKYGHLRVNQTFNWNTTKQEHFPDN

SEQ ID NO: 649 - protein, 208 aa, Artificial Sequence
  CD80 v430 ECD
VIHVTKEVKEVATLSCGHNVSVEELAQTRIYWQKEKKMVLTMMSGDVKIWPEYKNRTIFDITNNLSIVILALRPSDEGTYECVVLKYENDAFKREHLAEVTLSVKADFPTPSISDFETPTSNIRRIICSTSGGFPEPHLSWLENGEELNAINTTVSQDPETELYAVSSKLDFNMTTNHSFMCLIKYGHLRVNQTFNWNTTKQEHFPDN

SEQ ID NO: 650 - protein, 208 aa, Artificial Sequence
  CD80 v431 ECD
VIHVTKEVKEVATLSCGHNVSVEELAQTRIYWQKEKKMVLTMMSGDVNIWPEYKNRTIFDITNNLSIMILALRPSDEGTYECVVLKYENDAFKREHLAEVTLSVKADFPTPSISDFETPTSNIRRIICSTSGGFPEPHLSWLENGEELNAINTTVSQDPETELYAVSSKLDFNMTTNHSFMCLIKYGHLRVNQTFNWNTTKQEHFPDN

SEQ ID NO: 651 - protein, 208 aa, Artificial Sequence
  CD80 v432 ECD
VIHVTKEVKEVATLSCGHNVSVEELAQTRIYWQKEKKMVLTMMSGDMKIWPEYKNRTIFDITNNLSIMILALRPSDEGTYECVVLKYENDAFKREHLAEVTLSVKADFPTPSISDFETPTSNIRRIICSTSGGFPEPHLSWLENGEELNAINTTVSQDPETELYAVSSKLDFNMTTNHSFMCLIKYGHLRVNQTFNWNTTKQEHFPDN

SEQ ID NO: 652 - protein, 208 aa, Artificial Sequence
  CD80 v433 ECD
VIHVTKEVKEVATLSCGHNVSVEELAQTRIYWQKDKKMVLTMMSGDVKIWPEYKNRTIFDITNNLSIVILALRPSDEGTYECVVLKYENDAFKREHLAEVTLSVKADFPTPSISDFETPTSNIRRIICSTSGGFPEPHLSWLENGEELNAINTTVSQDPETELYAVSSKLDFNMTTNHSFMCLIKYGHLRVNQTFNWNTTKQEHFPDN

SEQ ID NO: 653 - protein, 208 aa, Artificial Sequence
  CD80 v434 ECD
VIHVTKEVKEVATLSCGHNVSVEELAQTRIYWQKDKKMVLTMMSGDVNIWPEYKNRTIFDITNNLSIMILALRPSDEGTYECVVLKYENDAFKREHLAEVTLSVKADFPTPSISDFETPTSNIRRIICSTSGGFPEPHLSWLENGEELNAINTTVSQDPETELYAVSSKLDFNMTTNHSFMCLIKYGHLRVNQTFNWNTTKQEHFPDN

SEQ ID NO: 654 - protein, 208 aa, Artificial Sequence
  CD80 v435 ECD
VIHVTKEVKEVATLSCGHNVSVEELAQTRIYWQKDKKMVLTMMSGDMKIWPEYKNRTIFDITNNLSIMILALRPSDEGTYECVVLKYENDAFKREHLAEVTLSVKADFPTPSISDFETPTSNIRRIICSTSGGFPEPHLSWLENGEELNAINTTVSQDPETELYAVSSKLDFNMTTNHSFMCLIKYGHLRVNQTFNWNTTKQEHFPDN

SEQ ID NO: 655 - protein, 208 aa, Artificial Sequence
  CD80 v436 ECD
VIHVTKEVKEVATLSCGHNVSVEELAQTRIYWQKEKKMVLTMMSGDVKIWPEYKNRTIFDITNNLSIMILALRPSDEGTYECVVLKYENDAFKREHLAEVTLSVKADFPTPSISDFETPTSNIRRIICSTSGGFPEPHLSWLENGEELNAINTTVSQDPETELYAVSSKLDFNMTTNHSFMCLIKYGHLRVNQTFNWNTTKQEHFPDN

SEQ ID NO: 656 - protein, 208 aa, Artificial Sequence
  CD80 v437 ECD
VIHVTKEVKEVATLSCGHNVSVEELAQTRIYWQKDKKMVLTMMSGVVKIWPEYKNRTIFDITNNLSIMILALRPSDEGTYECVVLKYEKDAFKREHLAEVTLSVKADFPTPSISDFETPTSNIRRIICSTSGGFPEPHLSWLENGEELNAINTTVSQDPETELYAVSSKLDFNMTTNHSFMCLIKYGHLRVNQTFNWNTTKQEHFPDN

SEQ ID NO: 657 - protein, 208 aa, Artificial Sequence
  CD80 v438 ECD
VIHVTKEVKEVATLSCGHNVSVEELAQTRIYWQKDKKMVLTMMSGVVNIWPEYKNRTIFDITNNLSIMILALRPSDEGTYECVVQKYEKDAFKREHLAEVTLSVKADFPTPSISDFETPTSNIRRIICSTSGGFPEPHLSWLENGEELNAINTTVSQDPETELYAVSSKLDFNMTTNHSFMCLIKYGHLRVNQTFNWNTTKQEHFPDN

SEQ ID NO: 658 - protein, 208 aa, Artificial Sequence
  CD80 v439 ECD
VIHVTKEVKEVATLSCGHNVSVEELAQTRIYWQKDKKMVLTMMSGVVNIWPEYKNRTIFDITNNLSIMILALRPSDEGTYECVVLKYENDAFKREHLAEVTLSVKADFPTPSISDFETPTSNIRRIICSTSGGFPEPHLSWLENGEELNAINTTVSQDPETELYAVSSKLDFNMTTNHSFMCLIKYGHLRVNQTFNWNTTKQEHFPDN

SEQ ID NO: 659 - protein, 208 aa, Artificial Sequence
  CD80 v440 ECD
VIHVTKEVKEVATLSCGHNVSVEELAQTRIYWQKDKKMVLTMMSGDVKIWPEYKNRTIFDITNNLSIMILALRPSDEGTYECVVQKYEKDAFKREHLAEVTLSVKADFPTPSISDFETPTSNIRRIICSTSGGFPEPHLSWLENGEELNAINTTVSQDPETELYAVSSKLDFNMTTNHSFMCLIKYGHLRVNQTFNWNTTKQEHFPDN

SEQ ID NO: 660 - protein, 208 aa, Artificial Sequence
  CD80 v441 ECD
VIHVTKEVKEVATLSCGHNVSVEELAQTRIYWQKDKKMVLTMMSGDVNIWPEYKNRTIFDITNNLSIMILALRPSDEGTYECVVQKYENDAFKREHLAEVTLSVKADFPTPSISDFETPTSNIRRIICSTSGGFPEPHLSWLENGEELNAINTTVSQDPETELYAVSSKLDFNMTTNHSFMCLIKYGHLRVNQTFNWNTTKQEHFPDN

SEQ ID NO: 661 - protein, 208 aa, Artificial Sequence
  CD80 v442 ECD
VIHVTKEVKEVATLSCGHNVSVEELEQTRIYWQKDKKMVLTMMSGDLNIWPEYKNRTIFDITNNLSIMILGLRPSDEGTYECVVLKYEKGAFKREHLAEVTLSVKADFPTPSISDFETPTSNIRRIICSTSGGFPEPHLSWLENGEELNAINTTVSQDPETELYAVSSKLDFNMTTNHSFMCLIKYGHLRVNQTFNWNTTKQEHFPDN

SEQ ID NO: 662 - protein, 208 aa, Artificial Sequence
  CD80 v443 ECD
VIHVTKEVKEVATLSCGYNVSVEELAQTRIYWQKDKKMVLTMMSGDLNIWPEYKNRTIFDITNNLSIMILGLRPSDEGTYECVVLKYEKGAFKREHLAEVTLSVKADFPTPSISDFETPTSNIRRIICSTSGGFPEPHLSWLENGEELNAINTTVSQDPETELYAVSSKLDFNMTTNHSFMCLIKYGHLRVNQTFNWNTTKQEHFPDN

SEQ ID NO: 663 - protein, 208 aa, Artificial Sequence
  CD80 v444 ECD
VIHVTKEVKEVATLSCGYNVSVEELEQTRIYWQKEKKMVLTMMSGDLNIWPEYKNRTIFDITNNLSIMILGLRPSDEGTYECVVLKYEKGAFKREHLAEVTLSVKADFPTPSISDFETPTSNIRRIICSTSGGFPEPHLSWLENGEELNAINTTVSQDPETELYAVSSKLDFNMTTNHSFMCLIKYGHLRVNQTFNWNTTKQEHFPDN

SEQ ID NO: 664 - protein, 208 aa, Artificial Sequence
  CD80 v445 ECD
VIHVTKEVKEVATLSCGYNVSVEELEQTRIYWQKDKKMVLTMMSGDMNIWPEYKNRTIFDITNNLSIMILGLRPSDEGTYECVVLKYEKGAFKREHLAEVTLSVKADFPTPSISDFETPTSNIRRIICSTSGGFPEPHLSWLENGEELNAINTTVSQDPETELYAVSSKLDFNMTTNHSFMCLIKYGHLRVNQTFNWNTTKQEHFPDN

SEQ ID NO: 665 - protein, 208 aa, Artificial Sequence
  CD80 v446 ECD
VIHVTKEVKEVATLSCGYNVSVEELEQTRIYWQKDKKMVLTMMSGDLNIWPEYKNRTIFDITNNLSIVILGLRPSDEGTYECVVLKYEKGAFKREHLAEVTLSVKADFPTPSISDFETPTSNIRRIICSTSGGFPEPHLSWLENGEELNAINTTVSQDPETELYAVSSKLDFNMTTNHSFMCLIKYGHLRVNQTFNWNTTKQEHFPDN

SEQ ID NO: 666 - protein, 208 aa, Artificial Sequence
  CD80 v447 ECD
VIHVTKEVKEVATLSCGYNVSVEELEQTRIYWQKDKKMVLTMMSGDLNIWPEYKNRTIFDITNNLSIMILALRPSDEGTYECVVLKYEKGAFKREHLAEVTLSVKADFPTPSISDFETPTSNIRRIICSTSGGFPEPHLSWLENGEELNAINTTVSQDPETELYAVSSKLDFNMTTNHSFMCLIKYGHLRVNQTFNWNTTKQEHFPDN

SEQ ID NO: 667 - protein, 208 aa, Artificial Sequence
  CD80 v448 ECD
VIHVTKEVKEVATLSCGYNVSVEELEQTRIYWQKDKKMVLTMMSGDLNIWPEYKNRTIFDITNNLSIMILGLRPSDEGTYECVVLKYEKDAFKREHLAEVTLSVKADFPTPSISDFETPTSNIRRIICSTSGGFPEPHLSWLENGEELNAINTTVSQDPETELYAVSSKLDFNMTTNHSFMCLIKYGHLRVNQTFNWNTTKQEHFPDN

SEQ ID NO: 668 - protein, 208 aa, Artificial Sequence
  CD80 v449 ECD
VIHVTKEVKEVATLSCGHNVSVEELAQTRIYWQKDKKMVLTMMSGDLNIWPEYKNRTIFDITNNLSIMILGLRPSDEGTYECVVLKYEKGAFKREHLAEVTLSVKADFPTPSISDFETPTSNIRRIICSTSGGFPEPHLSWLENGEELNAINTTVSQDPETELYAVSSKLDFNMTTNHSFMCLIKYGHLRVNQTFNWNTTKQEHFPDN

SEQ ID NO: 669 - protein, 208 aa, Artificial Sequence
  CD80 v450 ECD
VIHVTKEVKEVATLSCGYNVSVEELAQTRIYWQKEKKMVLTMMSGDLNIWPEYKNRTIFDITNNLSIMILGLRPSDEGTYECVVLKYEKGAFKREHLAEVTLSVKADFPTPSISDFETPTSNIRRIICSTSGGFPEPHLSWLENGEELNAINTTVSQDPETELYAVSSKLDFNMTTNHSFMCLIKYGHLRVNQTFNWNTTKQEHFPDN

SEQ ID NO: 670 - protein, 208 aa, Artificial Sequence
  CD80 v451 ECD
VIHVTKEVKEVATLSCGYNVSVEELEQTRIYWQKEKKMVLTMMSGDMNIWPEYKNRTIFDITNNLSIMILGLRPSDEGTYECVVLKYEKGAFKREHLAEVTLSVKADFPTPSISDFETPTSNIRRIICSTSGGFPEPHLSWLENGEELNAINTTVSQDPETELYAVSSKLDFNMTTNHSFMCLIKYGHLRVNQTFNWNTTKQEHFPDN

SEQ ID NO: 671 - protein, 208 aa, Artificial Sequence
  CD80 v452 ECD
VIHVTKEVKEVATLSCGYNVSVEELEQTRIYWQKDKKMVLTMMSGDMNIWPEYKNRTIFDITNNLSIVILGLRPSDEGTYECVVLKYEKGAFKREHLAEVTLSVKADFPTPSISDFETPTSNIRRIICSTSGGFPEPHLSWLENGEELNAINTTVSQDPETELYAVSSKLDFNMTTNHSFMCLIKYGHLRVNQTFNWNTTKQEHFPDN

SEQ ID NO: 672 - protein, 208 aa, Artificial Sequence
  CD80 v453 ECD
VIHVTKEVKEVATLSCGYNVSVEELEQTRIYWQKDKKMVLTMMSGDLNIWPEYKNRTIFDITNNLSIVILALRPSDEGTYECVVLKYEKGAFKREHLAEVTLSVKADFPTPSISDFETPTSNIRRIICSTSGGFPEPHLSWLENGEELNAINTTVSQDPETELYAVSSKLDFNMTTNHSFMCLIKYGHLRVNQTFNWNTTKQEHFPDN

SEQ ID NO: 673 - protein, 208 aa, Artificial Sequence
  CD80 v454 ECD
VIHVTKEVKEVATLSCGYNVSVEELEQTRIYWQKDKKMVLTMMSGDLNIWPEYKNRTIFDITNNLSIMILALRPSDEGTYECVVLKYEKDAFKREHLAEVTLSVKADFPTPSISDFETPTSNIRRIICSTSGGFPEPHLSWLENGEELNAINTTVSQDPETELYAVSSKLDFNMTTNHSFMCLIKYGHLRVNQTFNWNTTKQEHFPDN

SEQ ID NO: 674 - protein, 208 aa, Artificial Sequence
  CD80 v455 ECD
VIHVTKEVKEVATLSCGHNVSVEELEQTRIYWQKEKKMVLTMMSGDLNIWPEYKNRTIFDITNNLSIMILGLRPSDEGTYECVVLKYEKGAFKREHLAEVTLSVKADFPTPSISDFETPTSNIRRIICSTSGGFPEPHLSWLENGEELNAINTTVSQDPETELYAVSSKLDFNMTTNHSFMCLIKYGHLRVNQTFNWNTTKQEHFPDN

SEQ ID NO: 675 - protein, 208 aa, Artificial Sequence
  CD80 v456 ECD
VIHVTKEVKEVATLSCGHNVSVEELEQTRIYWQKDKKMVLTMMSGDMNIWPEYKNRTIFDITNNLSIMILGLRPSDEGTYECVVLKYEKGAFKREHLAEVTLSVKADFPTPSISDFETPTSNIRRIICSTSGGFPEPHLSWLENGEELNAINTTVSQDPETELYAVSSKLDFNMTTNHSFMCLIKYGHLRVNQTFNWNTTKQEHFPDN

SEQ ID NO: 676 - protein, 208 aa, Artificial Sequence
  CD80 v457 ECD
VIHVTKEVKEVATLSCGHNVSVEELEQTRIYWQKDKKMVLTMMSGDLNIWPEYKNRTIFDITNNLSIVILGLRPSDEGTYECVVLKYEKGAFKREHLAEVTLSVKADFPTPSISDFETPTSNIRRIICSTSGGFPEPHLSWLENGEELNAINTTVSQDPETELYAVSSKLDFNMTTNHSFMCLIKYGHLRVNQTFNWNTTKQEHFPDN

SEQ ID NO: 677 - protein, 208 aa, Artificial Sequence
  CD80 v458 ECD
VIHVTKEVKEVATLSCGHNVSVEELEQTRIYWQKDKKMVLTMMSGDLNIWPEYKNRTIFDITNNLSIMILALRPSDEGTYECVVLKYEKGAFKREHLAEVTLSVKADFPTPSISDFETPTSNIRRIICSTSGGFPEPHLSWLENGEELNAINTTVSQDPETELYAVSSKLDFNMTTNHSFMCLIKYGHLRVNQTFNWNTTKQEHFPDN

SEQ ID NO: 678 - protein, 208 aa, Artificial Sequence
  CD80 v459 ECD
VIHVTKEVKEVATLSCGHNVSVEELEQTRIYWQKDKKMVLTMMSGDLNIWPEYKNRTIFDITNNLSIMILGLRPSDEGTYECVVLKYEKDAFKREHLAEVTLSVKADFPTPSISDFETPTSNIRRIICSTSGGFPEPHLSWLENGEELNAINTTVSQDPETELYAVSSKLDFNMTTNHSFMCLIKYGHLRVNQTFNWNTTKQEHFPDN

SEQ ID NO: 679 - protein, 208 aa, Artificial Sequence
  CD80 v460 ECD
VIHVTKEVKEVATLSCGYNVSVEELAQTRIYWQKDKKMVLTMMSGDMNIWPEYKNRTIFDITNNLSIMILGLRPSDEGTYECVVLKYEKGAFKREHLAEVTLSVKADFPTPSISDFETPTSNIRRIICSTSGGFPEPHLSWLENGEELNAINTTVSQDPETELYAVSSKLDFNMTTNHSFMCLIKYGHLRVNQTFNWNTTKQEHFPDN

SEQ ID NO: 680 - protein, 208 aa, Artificial Sequence
  CD80 v461 ECD
VIHVTKEVKEVATLSCGYNVSVEELAQTRIYWQKDKKMVLTMMSGDLNIWPEYKNRTIFDITNNLSIVILGLRPSDEGTYECVVLKYEKGAFKREHLAEVTLSVKADFPTPSISDFETPTSNIRRIICSTSGGFPEPHLSWLENGEELNAINTTVSQDPETELYAVSSKLDFNMTTNHSFMCLIKYGHLRVNQTFNWNTTKQEHFPDN

SEQ ID NO: 681 - protein, 208 aa, Artificial Sequence
  CD80 v462 ECD
VIHVTKEVKEVATLSCGYNVSVEELAQTRIYWQKDKKMVLTMMSGDLNIWPEYKNRTIFDITNNLSIMILALRPSDEGTYECVVLKYEKGAFKREHLAEVTLSVKADFPTPSISDFETPTSNIRRIICSTSGGFPEPHLSWLENGEELNAINTTVSQDPETELYAVSSKLDFNMTTNHSFMCLIKYGHLRVNQTFNWNTTKQEHFPDN

SEQ ID NO: 682 - protein, 208 aa, Artificial Sequence
  CD80 v463 ECD
VIHVTKEVKEVATLSCGYNVSVEELAQTRIYWQKDKKMVLTMMSGDLNIWPEYKNRTIFDITNNLSIMILGLRPSDEGTYECVVLKYEKDAFKREHLAEVTLSVKADFPTPSISDFETPTSNIRRIICSTSGGFPEPHLSWLENGEELNAINTTVSQDPETELYAVSSKLDFNMTTNHSFMCLIKYGHLRVNQTFNWNTTKQEHFPDN

SEQ ID NO: 683 - protein, 208 aa, Artificial Sequence
  CD80 v464 ECD
VIHVTKEVKEVATLSCGYNVSVEELEQTRIYWQKEKKMVLTMMSGDLNIWPEYKNRTIFDITNNLSIVILGLRPSDEGTYECVVLKYEKGAFKREHLAEVTLSVKADFPTPSISDFETPTSNIRRIICSTSGGFPEPHLSWLENGEELNAINTTVSQDPETELYAVSSKLDFNMTTNHSFMCLIKYGHLRVNQTFNWNTTKQEHFPDN

SEQ ID NO: 684 - protein, 208 aa, Artificial Sequence
  CD80 v465 ECD
VIHVTKEVKEVATLSCGYNVSVEELEQTRIYWQKEKKMVLTMMSGDLNIWPEYKNRTIFDITNNLSIMILALRPSDEGTYECVVLKYEKGAFKREHLAEVTLSVKADFPTPSISDFETPTSNIRRIICSTSGGFPEPHLSWLENGEELNAINTTVSQDPETELYAVSSKLDFNMTTNHSFMCLIKYGHLRVNQTFNWNTTKQEHFPDN

SEQ ID NO: 685 - protein, 208 aa, Artificial Sequence
  CD80 v466 ECD
VIHVTKEVKEVATLSCGYNVSVEELEQTRIYWQKEKKMVLTMMSGDLNIWPEYKNRTIFDITNNLSIMILGLRPSDEGTYECVVLKYEKDAFKREHLAEVTLSVKADFPTPSISDFETPTSNIRRIICSTSGGFPEPHLSWLENGEELNAINTTVSQDPETELYAVSSKLDFNMTTNHSFMCLIKYGHLRVNQTFNWNTTKQEHFPDN

SEQ ID NO: 686 - protein, 208 aa, Artificial Sequence
  CD80 v467 ECD
VIHVTKEVKEVATLSCGYNVSVEELEQTRIYWQKDKKMVLTMMSGDMNIWPEYKNRTIFDITNNLSIMILALRPSDEGTYECVVLKYEKGAFKREHLAEVTLSVKADFPTPSISDFETPTSNIRRIICSTSGGFPEPHLSWLENGEELNAINTTVSQDPETELYAVSSKLDFNMTTNHSFMCLIKYGHLRVNQTFNWNTTKQEHFPDN

SEQ ID NO: 687 - protein, 208 aa, Artificial Sequence
  CD80 v468 ECD
VIHVTKEVKEVATLSCGYNVSVEELEQTRIYWQKDKKMVLTMMSGDMNIWPEYKNRTIFDITNNLSIMILGLRPSDEGTYECVVLKYEKDAFKREHLAEVTLSVKADFPTPSISDFETPTSNIRRIICSTSGGFPEPHLSWLENGEELNAINTTVSQDPETELYAVSSKLDFNMTTNHSFMCLIKYGHLRVNQTFNWNTTKQEHFPDN

SEQ ID NO: 688 - protein, 208 aa, Artificial Sequence
  CD80 v469 ECD
VIHVTKEVKEVATLSCGYNVSVEELEQTRIYWQKDKKMVLTMMSGDLNIWPEYKNRTIFDITNNLSIVILGLRPSDEGTYECVVLKYEKDAFKREHLAEVTLSVKADFPTPSISDFETPTSNIRRIICSTSGGFPEPHLSWLENGEELNAINTTVSQDPETELYAVSSKLDFNMTTNHSFMCLIKYGHLRVNQTFNWNTTKQEHFPDN

SEQ ID NO: 689 - protein, 208 aa, Artificial Sequence
  CD80 v470 ECD
VIHVTKEVKEVATLSCGHNVSVEELAQTRIYWQKEKKMVLTMMSGDLNIWPEYKNRTIFDITNNLSIMILGLRPSDEGTYECVVLKYEKGAFKREHLAEVTLSVKADFPTPSISDFETPTSNIRRIICSTSGGFPEPHLSWLENGEELNAINTTVSQDPETELYAVSSKLDFNMTTNHSFMCLIKYGHLRVNQTFNWNTTKQEHFPDN

SEQ ID NO: 690 - protein, 208 aa, Artificial Sequence
  CD80 v471 ECD
VIHVTKEVKEVATLSCGYNVSVEELAQTRIYWQKEKKMVLTMMSGDMNIWPEYKNRTIFDITNNLSIMILGLRPSDEGTYECVVLKYEKGAFKREHLAEVTLSVKADFPTPSISDFETPTSNIRRIICSTSGGFPEPHLSWLENGEELNAINTTVSQDPETELYAVSSKLDFNMTTNHSFMCLIKYGHLRVNQTFNWNTTKQEHFPDN

SEQ ID NO: 691 - protein, 208 aa, Artificial Sequence
  CD80 v472 ECD
VIHVTKEVKEVATLSCGYNVSVEELEQTRIYWQKEKKMVLTMMSGDMNIWPEYKNRTIFDITNNLSIVILGLRPSDEGTYECVVLKYEKGAFKREHLAEVTLSVKADFPTPSISDFETPTSNIRRIICSTSGGFPEPHLSWLENGEELNAINTTVSQDPETELYAVSSKLDFNMTTNHSFMCLIKYGHLRVNQTFNWNTTKQEHFPDN

SEQ ID NO: 692 - protein, 208 aa, Artificial Sequence
  CD80 v473 ECD
VIHVTKEVKEVATLSCGYNVSVEELEQTRIYWQKDKKMVLTMMSGDMNIWPEYKNRTIFDITNNLSIVILALRPSDEGTYECVVLKYEKGAFKREHLAEVTLSVKADFPTPSISDFETPTSNIRRIICSTSGGFPEPHLSWLENGEELNAINTTVSQDPETELYAVSSKLDFNMTTNHSFMCLIKYGHLRVNQTFNWNTTKQEHFPDN

SEQ ID NO: 693 - protein, 208 aa, Artificial Sequence
  CD80 v474 ECD
VIHVTKEVKEVATLSCGYNVSVEELEQTRIYWQKDKKMVLTMMSGDLNIWPEYKNRTIFDITNNLSIVILALRPSDEGTYECVVLKYEKDAFKREHLAEVTLSVKADFPTPSISDFETPTSNIRRIICSTSGGFPEPHLSWLENGEELNAINTTVSQDPETELYAVSSKLDFNMTTNHSFMCLIKYGHLRVNQTFNWNTTKQEHFPDN

SEQ ID NO: 694 - protein, 208 aa, Artificial Sequence
  CD80 v475 ECD
VIHVTKEVKEVATLSCGHNVSVEELAQTRIYWQKDKKMVLTMMSGDMNIWPEYKNRTIFDITNNLSIMILGLRPSDEGTYECVVLKYEKGAFKREHLAEVTLSVKADFPTPSISDFETPTSNIRRIICSTSGGFPEPHLSWLENGEELNAINTTVSQDPETELYAVSSKLDFNMTTNHSFMCLIKYGHLRVNQTFNWNTTKQEHFPDN

SEQ ID NO: 695 - protein, 208 aa, Artificial Sequence
  CD80 v476 ECD
VIHVTKEVKEVATLSCGHNVSVEELAQTRIYWQKDKKMVLTMMSGDLNIWPEYKNRTIFDITNNLSIVILGLRPSDEGTYECVVLKYEKGAFKREHLAEVTLSVKADFPTPSISDFETPTSNIRRIICSTSGGFPEPHLSWLENGEELNAINTTVSQDPETELYAVSSKLDFNMTTNHSFMCLIKYGHLRVNQTFNWNTTKQEHFPDN

SEQ ID NO: 696 - protein, 208 aa, Artificial Sequence
  CD80 v477 ECD
VIHVTKEVKEVATLSCGHNVSVEELAQTRIYWQKDKKMVLTMMSGDLNIWPEYKNRTIFDITNNLSIMILALRPSDEGTYECVVLKYEKGAFKREHLAEVTLSVKADFPTPSISDFETPTSNIRRIICSTSGGFPEPHLSWLENGEELNAINTTVSQDPETELYAVSSKLDFNMTTNHSFMCLIKYGHLRVNQTFNWNTTKQEHFPDN

SEQ ID NO: 697 - protein, 208 aa, Artificial Sequence
  CD80 v478 ECD
VIHVTKEVKEVATLSCGHNVSVEELAQTRIYWQKDKKMVLTMMSGDLNIWPEYKNRTIFDITNNLSIMILGLRPSDEGTYECVVLKYEKDAFKREHLAEVTLSVKADFPTPSISDFETPTSNIRRIICSTSGGFPEPHLSWLENGEELNAINTTVSQDPETELYAVSSKLDFNMTTNHSFMCLIKYGHLRVNQTFNWNTTKQEHFPDN

SEQ ID NO: 698 - protein, 208 aa, Artificial Sequence
  CD80 v479 ECD
VIHVTKEVKEVATLSCGHNVSVEELEQTRIYWQKEKKMVLTMMSGDMNIWPEYKNRTIFDITNNLSIMILGLRPSDEGTYECVVLKYEKGAFKREHLAEVTLSVKADFPTPSISDFETPTSNIRRIICSTSGGFPEPHLSWLENGEELNAINTTVSQDPETELYAVSSKLDFNMTTNHSFMCLIKYGHLRVNQTFNWNTTKQEHFPDN

SEQ ID NO: 699 - protein, 208 aa, Artificial Sequence
  CD80 v480 ECD
VIHVTKEVKEVATLSCGHNVSVEELEQTRIYWQKEKKMVLTMMSGDLNIWPEYKNRTIFDITNNLSIVILGLRPSDEGTYECVVLKYEKGAFKREHLAEVTLSVKADFPTPSISDFETPTSNIRRIICSTSGGFPEPHLSWLENGEELNAINTTVSQDPETELYAVSSKLDFNMTTNHSFMCLIKYGHLRVNQTFNWNTTKQEHFPDN

SEQ ID NO: 700 - protein, 208 aa, Artificial Sequence
  CD80 v481 ECD
VIHVTKEVKEVATLSCGHNVSVEELEQTRIYWQKEKKMVLTMMSGDLNIWPEYKNRTIFDITNNLSIMILALRPSDEGTYECVVLKYEKGAFKREHLAEVTLSVKADFPTPSISDFETPTSNIRRIICSTSGGFPEPHLSWLENGEELNAINTTVSQDPETELYAVSSKLDFNMTTNHSFMCLIKYGHLRVNQTFNWNTTKQEHFPDN

SEQ ID NO: 701 - protein, 208 aa, Artificial Sequence
  CD80 v482 ECD
VIHVTKEVKEVATLSCGHNVSVEELEQTRIYWQKEKKMVLTMMSGDLNIWPEYKNRTIFDITNNLSIMILGLRPSDEGTYECVVLKYEKDAFKREHLAEVTLSVKADFPTPSISDFETPTSNIRRIICSTSGGFPEPHLSWLENGEELNAINTTVSQDPETELYAVSSKLDFNMTTNHSFMCLIKYGHLRVNQTFNWNTTKQEHFPDN

SEQ ID NO: 702 - protein, 208 aa, Artificial Sequence
  CD80 v483 ECD
VIHVTKEVKEVATLSCGHNVSVEELEQTRIYWQKDKKMVLTMMSGDMNIWPEYKNRTIFDITNNLSIVILGLRPSDEGTYECVVLKYEKGAFKREHLAEVTLSVKADFPTPSISDFETPTSNIRRIICSTSGGFPEPHLSWLENGEELNAINTTVSQDPETELYAVSSKLDFNMTTNHSFMCLIKYGHLRVNQTFNWNTTKQEHFPDN

SEQ ID NO: 703 - protein, 208 aa, Artificial Sequence
  CD80 v484 ECD
VIHVTKEVKEVATLSCGHNVSVEELEQTRIYWQKDKKMVLTMMSGDMNIWPEYKNRTIFDITNNLSIMILALRPSDEGTYECVVLKYEKGAFKREHLAEVTLSVKADFPTPSISDFETPTSNIRRIICSTSGGFPEPHLSWLENGEELNAINTTVSQDPETELYAVSSKLDFNMTTNHSFMCLIKYGHLRVNQTFNWNTTKQEHFPDN

SEQ ID NO: 704 - protein, 208 aa, Artificial Sequence
  CD80 v485 ECD
VIHVTKEVKEVATLSCGHNVSVEELEQTRIYWQKDKKMVLTMMSGDMNIWPEYKNRTIFDITNNLSIMILGLRPSDEGTYECVVLKYEKDAFKREHLAEVTLSVKADFPTPSISDFETPTSNIRRIICSTSGGFPEPHLSWLENGEELNAINTTVSQDPETELYAVSSKLDFNMTTNHSFMCLIKYGHLRVNQTFNWNTTKQEHFPDN

SEQ ID NO: 705 - protein, 208 aa, Artificial Sequence
  CD80 v486 ECD
VIHVTKEVKEVATLSCGHNVSVEELEQTRIYWQKDKKMVLTMMSGDLNIWPEYKNRTIFDITNNLSIVILALRPSDEGTYECVVLKYEKGAFKREHLAEVTLSVKADFPTPSISDFETPTSNIRRIICSTSGGFPEPHLSWLENGEELNAINTTVSQDPETELYAVSSKLDFNMTTNHSFMCLIKYGHLRVNQTFNWNTTKQEHFPDN

SEQ ID NO: 706 - protein, 208 aa, Artificial Sequence
  CD80 v487 ECD
VIHVTKEVKEVATLSCGHNVSVEELEQTRIYWQKDKKMVLTMMSGDLNIWPEYKNRTIFDITNNLSIMILALRPSDEGTYECVVLKYEKDAFKREHLAEVTLSVKADFPTPSISDFETPTSNIRRIICSTSGGFPEPHLSWLENGEELNAINTTVSQDPETELYAVSSKLDFNMTTNHSFMCLIKYGHLRVNQTFNWNTTKQEHFPDN

SEQ ID NO: 707 - protein, 208 aa, Artificial Sequence
  CD80 v488 ECD
VIHVTKEVKEVATLSCGYNVSVEELAQTRIYWQKEKKMVLTMMSGDLNIWPEYKNRTIFDITNNLSIVILGLRPSDEGTYECVVLKYEKGAFKREHLAEVTLSVKADFPTPSISDFETPTSNIRRIICSTSGGFPEPHLSWLENGEELNAINTTVSQDPETELYAVSSKLDFNMTTNHSFMCLIKYGHLRVNQTFNWNTTKQEHFPDN

SEQ ID NO: 708 - protein, 208 aa, Artificial Sequence
  CD80 v489 ECD
VIHVTKEVKEVATLSCGYNVSVEELAQTRIYWQKEKKMVLTMMSGDLNIWPEYKNRTIFDITNNLSIMILALRPSDEGTYECVVLKYEKGAFKREHLAEVTLSVKADFPTPSISDFETPTSNIRRIICSTSGGFPEPHLSWLENGEELNAINTTVSQDPETELYAVSSKLDFNMTTNHSFMCLIKYGHLRVNQTFNWNTTKQEHFPDN

SEQ ID NO: 709 - protein, 208 aa, Artificial Sequence
  CD80 v490 ECD
VIHVTKEVKEVATLSCGYNVSVEELAQTRIYWQKEKKMVLTMMSGDLNIWPEYKNRTIFDITNNLSIMILGLRPSDEGTYECVVLKYEKDAFKREHLAEVTLSVKADFPTPSISDFETPTSNIRRIICSTSGGFPEPHLSWLENGEELNAINTTVSQDPETELYAVSSKLDFNMTTNHSFMCLIKYGHLRVNQTFNWNTTKQEHFPDN

SEQ ID NO: 710 - protein, 208 aa, Artificial Sequence
  CD80 v491 ECD
VIHVTKEVKEVATLSCGYNVSVEELAQTRIYWQKDKKMVLTMMSGDMNIWPEYKNRTIFDITNNLSIVILGLRPSDEGTYECVVLKYEKGAFKREHLAEVTLSVKADFPTPSISDFETPTSNIRRIICSTSGGFPEPHLSWLENGEELNAINTTVSQDPETELYAVSSKLDFNMTTNHSFMCLIKYGHLRVNQTFNWNTTKQEHFPDN

SEQ ID NO: 711 - protein, 208 aa, Artificial Sequence
  CD80 v492 ECD
VIHVTKEVKEVATLSCGYNVSVEELAQTRIYWQKDKKMVLTMMSGDMNIWPEYKNRTIFDITNNLSIMILALRPSDEGTYECVVLKYEKGAFKREHLAEVTLSVKADFPTPSISDFETPTSNIRRIICSTSGGFPEPHLSWLENGEELNAINTTVSQDPETELYAVSSKLDFNMTTNHSFMCLIKYGHLRVNQTFNWNTTKQEHFPDN

SEQ ID NO: 712 - protein, 208 aa, Artificial Sequence
  CD80 v493 ECD
VIHVTKEVKEVATLSCGYNVSVEELAQTRIYWQKDKKMVLTMMSGDMNIWPEYKNRTIFDITNNLSIMILGLRPSDEGTYECVVLKYEKDAFKREHLAEVTLSVKADFPTPSISDFETPTSNIRRIICSTSGGFPEPHLSWLENGEELNAINTTVSQDPETELYAVSSKLDFNMTTNHSFMCLIKYGHLRVNQTFNWNTTKQEHFPDN

SEQ ID NO: 713 - protein, 208 aa, Artificial Sequence
  CD80 v494 ECD
VIHVTKEVKEVATLSCGYNVSVEELAQTRIYWQKDKKMVLTMMSGDLNIWPEYKNRTIFDITNNLSIVILALRPSDEGTYECVVLKYEKGAFKREHLAEVTLSVKADFPTPSISDFETPTSNIRRIICSTSGGFPEPHLSWLENGEELNAINTTVSQDPETELYAVSSKLDFNMTTNHSFMCLIKYGHLRVNQTFNWNTTKQEHFPDN

SEQ ID NO: 714 - protein, 208 aa, Artificial Sequence
  CD80 v495 ECD
VIHVTKEVKEVATLSCGYNVSVEELAQTRIYWQKDKKMVLTMMSGDLNIWPEYKNRTIFDITNNLSIVILGLRPSDEGTYECVVLKYEKDAFKREHLAEVTLSVKADFPTPSISDFETPTSNIRRIICSTSGGFPEPHLSWLENGEELNAINTTVSQDPETELYAVSSKLDFNMTTNHSFMCLIKYGHLRVNQTFNWNTTKQEHFPDN

SEQ ID NO: 715 - protein, 208 aa, Artificial Sequence
  CD80 v496 ECD
VIHVTKEVKEVATLSCGYNVSVEELAQTRIYWQKDKKMVLTMMSGDLNIWPEYKNRTIFDITNNLSIMILALRPSDEGTYECVVLKYEKDAFKREHLAEVTLSVKADFPTPSISDFETPTSNIRRIICSTSGGFPEPHLSWLENGEELNAINTTVSQDPETELYAVSSKLDFNMTTNHSFMCLIKYGHLRVNQTFNWNTTKQEHFPDN

SEQ ID NO: 716 - protein, 208 aa, Artificial Sequence
  CD80 v497 ECD
VIHVTKEVKEVATLSCGYNVSVEELEQTRIYWQKEKKMVLTMMSGDMNIWPEYKNRTIFDITNNLSIMILALRPSDEGTYECVVLKYEKGAFKREHLAEVTLSVKADFPTPSISDFETPTSNIRRIICSTSGGFPEPHLSWLENGEELNAINTTVSQDPETELYAVSSKLDFNMTTNHSFMCLIKYGHLRVNQTFNWNTTKQEHFPDN

SEQ ID NO: 717 - protein, 208 aa, Artificial Sequence
  CD80 v498 ECD
VIHVTKEVKEVATLSCGYNVSVEELEQTRIYWQKEKKMVLTMMSGDMNIWPEYKNRTIFDITNNLSIMILGLRPSDEGTYECVVLKYEKDAFKREHLAEVTLSVKADFPTPSISDFETPTSNIRRIICSTSGGFPEPHLSWLENGEELNAINTTVSQDPETELYAVSSKLDFNMTTNHSFMCLIKYGHLRVNQTFNWNTTKQEHFPDN

SEQ ID NO: 718 - protein, 208 aa, Artificial Sequence
  CD80 v499 ECD
VIHVTKEVKEVATLSCGYNVSVEELEQTRIYWQKEKKMVLTMMSGDLNIWPEYKNRTIFDITNNLSIVILALRPSDEGTYECVVLKYEKGAFKREHLAEVTLSVKADFPTPSISDFETPTSNIRRIICSTSGGFPEPHLSWLENGEELNAINTTVSQDPETELYAVSSKLDFNMTTNHSFMCLIKYGHLRVNQTFNWNTTKQEHFPDN

SEQ ID NO: 719 - protein, 208 aa, Artificial Sequence
  CD80 v500 ECD
VIHVTKEVKEVATLSCGYNVSVEELEQTRIYWQKEKKMVLTMMSGDLNIWPEYKNRTIFDITNNLSIVILGLRPSDEGTYECVVLKYEKDAFKREHLAEVTLSVKADFPTPSISDFETPTSNIRRIICSTSGGFPEPHLSWLENGEELNAINTTVSQDPETELYAVSSKLDFNMTTNHSFMCLIKYGHLRVNQTFNWNTTKQEHFPDN

SEQ ID NO: 720 - protein, 208 aa, Artificial Sequence
  CD80 v501 ECD
VIHVTKEVKEVATLSCGYNVSVEELEQTRIYWQKEKKMVLTMMSGDLNIWPEYKNRTIFDITNNLSIMILALRPSDEGTYECVVLKYEKDAFKREHLAEVTLSVKADFPTPSISDFETPTSNIRRIICSTSGGFPEPHLSWLENGEELNAINTTVSQDPETELYAVSSKLDFNMTTNHSFMCLIKYGHLRVNQTFNWNTTKQEHFPDN

SEQ ID NO: 721 - protein, 208 aa, Artificial Sequence
  CD80 v502 ECD
VIHVTKEVKEVATLSCGYNVSVEELEQTRIYWQKDKKMVLTMMSGDMNIWPEYKNRTIFDITNNLSIVILGLRPSDEGTYECVVLKYEKDAFKREHLAEVTLSVKADFPTPSISDFETPTSNIRRIICSTSGGFPEPHLSWLENGEELNAINTTVSQDPETELYAVSSKLDFNMTTNHSFMCLIKYGHLRVNQTFNWNTTKQEHFPDN

SEQ ID NO: 722 - protein, 208 aa, Artificial Sequence
  CD80 v503 ECD
VIHVTKEVKEVATLSCGYNVSVEELEQTRIYWQKDKKMVLTMMSGDMNIWPEYKNRTIFDITNNLSIMILALRPSDEGTYECVVLKYEKDAFKREHLAEVTLSVKADFPTPSISDFETPTSNIRRIICSTSGGFPEPHLSWLENGEELNAINTTVSQDPETELYAVSSKLDFNMTTNHSFMCLIKYGHLRVNQTFNWNTTKQEHFPDN

SEQ ID NO: 723 - protein, 101 aa, Artificial Sequence
  CD80 v292 IgV
VIHVTKEVKEVATLSCGHNVSVEELAQTRIYWQKDKKMVLTMMSGDMKIWPEYKNRTIFDITNNLSIVILAVRPSDEGTYECVVLKYEKDAFKREHLAEVT

SEQ ID NO: 724 - protein, 101 aa, Artificial Sequence
  CD80 v293 IgV
VIHVTKEVKEVATLSCGHNVSVEELAQTRIYWQKDKKMVLSMMSGDMTIWPEYKNRTIFDITNNLSIVILALRPSDEGTYECVVLKYEKDAFKREHLAEVT

SEQ ID NO: 725 - protein, 101 aa, Artificial Sequence
  CD80 v294 IgV
VIHVTKEVKEVATLSCGHNVSVEELAQTRIYWQKEKKMVLTMMSGVINIWPEYKNRTIFDITNNLSIVILGLRPSDEGTYECVVLKYEKDAFKREHLAEVT

SEQ ID NO: 726 - protein, 101 aa, Artificial Sequence
  CD80 v295 IgV
VIHVTKEVKEVATLSCGHNVSVEELAQTRIYWQKEKKMVLTMMSGDINIWPEYKNRTIFDITNNLSIVILGLRPSDEGTYECVVLKYEKDAFKREHLAEVT

SEQ ID NO: 727 - protein, 101 aa, Artificial Sequence
  CD80 v296 IgV
VIHVTKEVKEVATLSCGHNVSVEELAQTRIYWQKDKKMVLTMISGDLNIWPEYKNRTIFDITNNLSIVILALRPSDEGTYECVVMKYEKDAFKREHLAEVT

SEQ ID NO: 728 - protein, 101 aa, Artificial Sequence
  CD80 v297 IgV
VIHVTKEVKEVATLSCGHNVSVEELAQTRIYWQKDKKMVLTMISGEMNIWPEYKNRTIFDITNNLSIVILGLRPSDEGTYECVVMKYEKDAFKREHLAEVT

SEQ ID NO: 729 - protein, 101 aa, Artificial Sequence
  CD80 v298 IgV
VIHVTKEVKEVATLSCGYNVSVEELAQTRIYWQKDKKMVLTMMSGDLNIWPEYKNRTIFDITNNLSIVILGLRPSDEGTYECVVLKYEKDSFKREHLAEVT

SEQ ID NO: 730 - protein, 101 aa, Artificial Sequence
  CD80 v299 IgV
VIHVTKEVKEVATLSCGHNVSVEELAQTRIYWQKDKKMVLTMMSGDIKIWPEYKNRTIFDFTNNLSIVILALRPSDEGTYECVVLKYEKDAFKREHLAEVT

SEQ ID NO: 731 - protein, 101 aa, Artificial Sequence
  CD80 v300 IgV
VIHVTKEVKEVATLSCGHNVSVEELAQTRIYWQKDKKMVLTMMSGDVNIWPEYKNRTIFDISNNLSIVILALRPSDEGTYECVVQKYEKDAFKREHLAEVT

SEQ ID NO: 732 - protein, 101 aa, Artificial Sequence
  CD80 v301 IgV
VIHVTKEVKEVATLSCGHNVSVEELAQTRIYWQKEKKMVLTMISGDLNIWPEYKNRTIFDITNNLSIVILGLRPSDEGTYECVVLKYEKDAFKREHLAEVT

SEQ ID NO: 733 - protein, 101 aa, Artificial Sequence
  CD80 v302 IgV
VIHVTKEVKEVATLSCGHNVSVEELAQTRIYWQKDKKMVLTMMSGDVNIWPEYKNRTIFDITNNLSIVILALRPSDEGTYECVVLKYEKDAFKREHLAEVT

SEQ ID NO: 734 - protein, 101 aa, Artificial Sequence
  CD80 v303 IgV
VIHVTKEVKEVATLSCGHNVSVEELAQTRIYWQKDKKMVLTMMSGDLNIWPEYKNRTIFDITNNLSIVILGLRPSDEGTYECVVMKYEKDAFKREHLAEVT

SEQ ID NO: 735 - protein, 101 aa, Artificial Sequence
  CD80 v304 IgV
VIHVTKEVKEVATLSCGHNVSAEELAQTRIYWQKDKKMVLTMMSGDLNIWPEYKNRTIFDITNNLSIVILGLRPSDEGTYECVVLKYEKDAFKREHLAEVT

SEQ ID NO: 736 - protein, 101 aa, Artificial Sequence
  CD80 v305 IgV
VIHVTKEVKEVATLSCGHNVSVEELAQTRIYWQKDKKMVLTMMSGDLNIWPEYKNRTIFDITNNLSIVILGLRPSDEGTYECVVLKYEKDAFKREHLAEVT

SEQ ID NO: 737 - protein, 101 aa, Artificial Sequence
  CD80 v306 IgV
VIHVTKEVKEVATLSCGHNVSVEELAQTRIYWQKDKKMVLTMMSGEINIWPEYKNRTIFDITNNLSIVILALRPSDEGTYECVVLKYEKDAFKREHLAEVT

SEQ ID NO: 738 - protein, 101 aa, Artificial Sequence
  CD80 v307 IgV
VIHVTKEVKEVATLSCGHNVSVEELAHTRIYWQKDKKMVLTMMSGDINIWPEYKNRTIFDITNNLSIVILALRPSDEGTYECVVLKYEKDAFKREHLAEVT

SEQ ID NO: 739 - protein, 101 aa, Artificial Sequence
  CD80 v308 IgV
VIHVTKEVKEVATLSCGHNVSVEELAQTRIYWQKDKKMVLTMMSGEMNIWPEYKNRTIFDITNNLSIVILALRPSDEGTYECVVMKYEKDAFKREHLAEVT

SEQ ID NO: 740 - protein, 101 aa, Artificial Sequence
  CD80 v309 IgV
VIHVTKEVKEVATLSCGHNVSVEELAQTRIYWQKDKKMVLTMMSGEMNIWPEYKNRTIFDITNNLSIVILALRPSDEGTYECVVLKYEKDGFKREHLAEVT

SEQ ID NO: 741 - protein, 101 aa, Artificial Sequence
  CD80 v310 IgV
VIHVTKEVKEVATLSCGHNVSVEELAQTRIYWQKDKKMVLTMMSGEMNIWPEYKNRTIFDITNNLSIVILALRPSDEGTYECVVLKYEKDAFKREHLAEVT

SEQ ID NO: 742 - protein, 101 aa, Artificial Sequence
  CD80 v311 IgV
VIHVTKEVKEVATLSCGHNVSVEELAQTRIYWQKDKKMVLTMMSGDMNIWPEYKNRTIFDITNNLSIVILALRPSDEGTYECVVLKYEKDAFKREHRAEVT

SEQ ID NO: 743 - protein, 101 aa, Artificial Sequence
  CD80 v312 IgV
VIHVTKEVKEVATLSCGYNVSVEELAQTRIYWQKDKKMVLTMMSGDMNIWPEYKNRTIFDITNNLSIVILALRPSDEGTYECVVLKYEKDAFKREHLAEVT

SEQ ID NO: 744 - protein, 101 aa, Artificial Sequence
  CD80 v313 IgV
VIHVTKEVKEVATLSCGHNVSVEELALTRIYWQKDKKMVLTMMSGDVNIWPEYKNRTIFDVTNNLSIVILALRPSDEGTYECVVMKYEKDAFKREHLAEVT

SEQ ID NO: 745 - protein, 101 aa, Artificial Sequence
  CD80 v314 IgV
VIHVTKEVKEVATLSCGHNVSVEELAQTRIYWQKDKKMVLTMMSGDVNIWPEYKNRTIFDVTNNLSIVILALRPSDEGTYECVVMKYEKDAFKREHLAEVT

SEQ ID NO: 746 - protein, 101 aa, Artificial Sequence
  CD80 v315 IgV
VIHVTKEVKEVATLSCGHNVSVEELAQTRIYWQKDKKMVLTMMSGDVNIWPEYKNRTIFDITNNLSIVILALRPSDEGTYECVVMKYEKDAFKQEHLAEVT

SEQ ID NO: 747 - protein, 101 aa, Artificial Sequence
  CD80 v316 IgV
VIHVTKEVKEVATLSCGHNVSVEELAQTRIYWQKDKKMVLTMMSGDVKIWPEYKNRTIFDITNNLSIVILALRPSDEGTYECVVMKYEKDAFKREHLAEVT

SEQ ID NO: 748 - protein, 101 aa, Artificial Sequence
  CD80 v317 IgV
VIHVTKEVKEVATLSCGYNVSVEELAQTRIYWQKDKKMVLTMMSGDVKIWPEYKNRTIFDITNNLSIVILALRPSDEGTYECVVLKYEKDAFKREHLAEVT

SEQ ID NO: 749 - protein, 101 aa, Artificial Sequence
  CD80 v318 IgV
VIHVTKEVKEVATLSCGHNVSVEELERTRIYWQKDKKMVLTMMSGDLYIWPEYKNRTIFDITNNLSIVILALRPSDEGTYECVVQKYEKDAFKREHLAEVT

SEQ ID NO: 750 - protein, 101 aa, Artificial Sequence
  CD80 v319 IgV
VIHVTKEVKEVATLSCGHNVSVEELAQTRIYWQKDKKMVLTMMSGELNIWPEYKNRTIFDITNNLSIMILALRPSDEGTYECVVQKYEKDALKREHLAEVT

SEQ ID NO: 751 - protein, 101 aa, Artificial Sequence
  CD80 v320 IgV
VIHVTKEVKEVATLSCGHNVSVEELAQTRIYWQKDKKMVLTMMSGDINIWPEYKNRTIFDISNNLSIVILALRPSDEGTYECVVQKYDKDAFKREHLAEVT

SEQ ID NO: 752 - protein, 101 aa, Artificial Sequence
  CD80 v321 IgV
VIHVTKEVKEVATLSCGHNVSVEDLARTRIYWQKDKKMVLSMMSGDVNIWPEYKNRTIFDITNNLSIVILALRPSDEGTYECVVQKYEKDAFKREHLAEVT

SEQ ID NO: 753 - protein, 101 aa, Artificial Sequence
  CD80 v322 IgV
VIHVTKEVKEVATLTCGYNVSVEELAQTRIYWQKDKKMVLTMMSGDVNIWPEYKNRTIFDIANSLSIVILGLRPSDEGTYECVVQKYEKNAFKREHLAEVT

SEQ ID NO: 754 - protein, 101 aa, Artificial Sequence
  CD80 v323 IgV
VIHVTKEVKEVATLSCGHNVSVEELAQTRIYWQKDKKMVLTMMSGDLNIWPEYKNRTIFDITNNLSIMILGLRPSDEGTYECVVQKYEKGAFKREHLAEVT

SEQ ID NO: 755 - protein, 101 aa, Artificial Sequence
  CD80 v324 IgV
VIHVTKEVKEVATLSCGYNVSVEELAQTRIYWQKDKKMVLTMMSGDINIWPEYKNRTIFDITNNLSIMILGLRPSDEGTYECVVLKYEKDAFKLEHLAEVT

SEQ ID NO: 756 - protein, 12 aa, Artificial Sequence
  CD80 v325 IgV
VIHVTKEVKEVT

SEQ ID NO: 757 - protein, 101 aa, Artificial Sequence
  CD80 v326 IgV
VIHVTKEVKEVATLSCGHNVSVEELAQTRIYWRKEKKMVLTMMSGDVNIWPEYKNRTIFDINNNLSIVILGLRPSDEGTYECVVLKYEKDAFKREHLAEVT

SEQ ID NO: 758 - protein, 101 aa, Artificial Sequence
  CD80 v327 IgV
VIHVTKEVKEVATLSCGYNVSAEELAQTRIYWQKDKKMVLSMMSGDVNIWPEYKNRTIFDINNNLSIVILGLRPSDEGTYECVVLKYEKDGFKREHLAEVT

SEQ ID NO: 759 - protein, 101 aa, Artificial Sequence
  CD80 v328 IgV
VIHVTKEVKEVATLSCGHNVSVEELAQTRIYWQKDKKMVLTMMSGDLNIWPEYKNRTIFDITNNLSIVIMALRPSDEGTYECVVLKYEKDAFKREHLAEVT

SEQ ID NO: 760 - protein, 101 aa, Artificial Sequence
  CD80 v329 IgV
VIHVTKEVKEVATLSCGHNVSVEELAQTRIYWQKDKKMVLTMMSGDLNIWPEYKNRTIFDITNNLSIMILALRPSDEGTYECVVLKYEKDAFKREHLAEVT

SEQ ID NO: 761 - protein, 101 aa, Artificial Sequence
  CD80 v330 IgV
VIHVTKEVKEVATLSCGHNVSVEELAQTRIYWQKDKKMVLTMMSGVLNIWPEYKNRTIFDITNNLSIMILALRPSDEGTYECVVLKYDKDAFKREHLAEVT

SEQ ID NO: 762 - protein, 101 aa, Artificial Sequence
  CD80 v331 IgV
VIHVTKEVKEVATLSCGHNVSVEELAQTRIYWQKDKKMVLTMMSGVLNIWPEYKNRTIFDITNNLSIMILALRPSDEGTYECVVLKYEKGAFKREHLAEVT

SEQ ID NO: 763 - protein, 101 aa, Artificial Sequence
  CD80 v332 IgV
VIHVTKEVKEVATLSCGHNVSVEELAQTRIYWQKDKKMVLTMMSGVLNIWPEYKNRTIFDITNNLSIMILALRPSDEGTYECVVLKYENDAFKREHLAEVT

SEQ ID NO: 764 - protein, 101 aa, Artificial Sequence
  CD80 v333 IgV
VIHVTKEVKEVATLSCGHNVSVEELAQTRIYWQKDKKMVLTMMSGVLNIWPEYKNRTIFDITNNLSIMILALRPSDEGTYECVVQKYEKDAFKREHLAEVT

SEQ ID NO: 765 - protein, 101 aa, Artificial Sequence
  CD80 v334 IgV
VIHVTKEVKEVATLSCGHNVSVEELAQTRIYWQKDKKMVLTMMSGVLNIWPEYKNRTIFDITNNLSIMILALRPSDEGTYECVVLKYEKDAFKREHLAEVT

SEQ ID NO: 766 - protein, 101 aa, Artificial Sequence
  CD80 v335 IgV
VIHVTKEVKEVATLSCGHNVSVEELAQTRIYWQKDKKMVLTMMSGVLNIWPEYKNRTIFDITNNLSIVIMALRPSDEGTYECVVLKYEKDAFKREHLAEVT

SEQ ID NO: 767 - protein, 101 aa, Artificial Sequence
  CD80 v336 IgV
VIHVTKEVKEVATLSCGHNVSVEELAQTRIYWQKDKKMVLTMMSGVLNIWPEYKNRTIFDITNNLSIVIMALRPSDEGTYECVVQKYEKDAFKREHLAEVT

SEQ ID NO: 768 - protein, 101 aa, Artificial Sequence
  CD80 v337 IgV
VIHVTKEVKEVATLSCGHNVSVEELAQTRIYWQKDKKMVLTMMSGDVKIWPEYKNRTIFDITNNLSIMILALRPSDEGTYECVVLKYEKDAFKREHLAEVT

SEQ ID NO: 769 - protein, 101 aa, Artificial Sequence
  CD80 v338 IgV
VIHVTKEVKEVATLSCGHNVSVEDLAQTRIYWQKDKKMVLTMMSGDLNIWPEYKNRTIFDITNNLSIMILALRPSDEGTYECVVLKYEKDAFKRVHQAEVT

SEQ ID NO: 770 - protein, 101 aa, Artificial Sequence
  CD80 v339 IgV
VIHVTKEVKEVATLSCGHNVSVEELAQTRIYWQKDKKMVLTMMSGEINIWPEYKNRTIFDIANNLSIMILALRPSDEGTYECVVMKCEKDAFKREHLAEVT

SEQ ID NO: 771 - protein, 101 aa, Artificial Sequence
  CD80 v340 IgV
VIHVTKEVKEVATLSCGHNVSVEELAQTRIYWQKDKKMVLTMMSGEINIWPEYKNRTIFDITNNLSIMILALRPSDEGTYECVVMKYEKDAFKREHLAEVT

SEQ ID NO: 772 - protein, 101 aa, Artificial Sequence
  CD80 v341 IgV
VIHVTKEVKEVATLSCGHNVSVEELAQTRIYWQKDKKMVLTMMSGELNIWPEYKNRTIFDITNNLSIMILGLRPSDEGTYECVVLKCEKDAFRREHLAEVT

SEQ ID NO: 773 - protein, 101 aa, Artificial Sequence
  CD80 v342 IgV
VIHVTKEVKEVATLSCGHNVSVEELAQTRIYWQKDKKMVLTMMSGELNIWPEYKNRTIFDITNNLSIMILALRPSDEGMYECVVMKYEKDAFKREHLAEVT

SEQ ID NO: 774 - protein, 101 aa, Artificial Sequence
  CD80 v343 IgV
VIHVTKEVKEVATLSCGHNVSVEELAQTRIYWQKDKKMVLTMMSGELNIWPEYKNRTIFDITNNLSIMILALRPSDEGMYECVVMKYEKDAFKREHQAEVT

SEQ ID NO: 775 - protein, 101 aa, Artificial Sequence
  CD80 v344 IgV
VIHVTKEVKEVATLSCGHNVSVEELAQTRIYWQKDKKMVLTMMSGEVNIWPEYKNRTIFDITNNLSIMILALRPSDEGTYECVVQKYEKDAFKREHLAEVT

SEQ ID NO: 776 - protein, 101 aa, Artificial Sequence
  CD80 v345 IgV
VIHVTKEVKEVATLSCGHNVSVEELAQTRIYWQKDKKMVLTMISGDLNIWPEYKNRTIFDITNNLSIMILALRPSDEGTYECVVLKYEKDAFKREHLAEVT

SEQ ID NO: 777 - protein, 101 aa, Artificial Sequence
  CD80 v346 IgV
VIHVTKEVKEVATLSCGHNVSVEELAQTRIYWQKDKKMVLTMMSGDINIWPEYKNRTIFDITNNLSIMILALRPSDEGTYECVVLKNEKDAFKREHLAEVT

SEQ ID NO: 778 - protein, 101 aa, Artificial Sequence
  CD80 v347 IgV
VIHVTKEVKEVATLSCGHNVSVEELAQTRIYWQKDKKMVLTMMSGDLNIWPEYKNRTIFDITNNLSIMILALRPSDEGTYECVVLKYEKDAFKRVHQAEVT

SEQ ID NO: 779 - protein, 101 aa, Artificial Sequence
  CD80 v348 IgV
VIHVTKEVKEVATLSCGHNVSVEELAQTRIYWQKDKKMVLTMMSGDLNIWPEFKNRTIFDITNNLSIMILGLRPSDEGTYECVVLKYEKDAFRRVHLAEVT

SEQ ID NO: 780 - protein, 101 aa, Artificial Sequence
  CD80 v349 IgV
VIHVTKEVKEVATLSCGHNVSVEELAQTRIYWQKDKKMVLTMMSGDVKIWPEYKNRTIFDITNNLSIMILGLRPSDEGTYECVVMKYEKDAFKREHLAEVT

SEQ ID NO: 781 - protein, 101 aa, Artificial Sequence
  CD80 v350 IgV
VIHVTKEVKEVATLSCGHNVSVEELAQTRIYWQKDKKMVLTMMSGDVKIWPEYKNRTIFDITNNLSIMILALRPSDEGTYECVVMKYEKDAFKREHLAEVT

SEQ ID NO: 782 - protein, 101 aa, Artificial Sequence
  CD80 v351 IgV
VIHVTKEVKEVATLSCGHNVSVEELAQTRIYWQKDKKMVLTMMSGDVNIWPEYKNRTIFDITNNLSIMILALRPSDEGTYECVVMKYEKDAFKREHLAEVT

SEQ ID NO: 783 - protein, 101 aa, Artificial Sequence
  CD80 v352 IgV
VIHVTKEVKEVATLSCGHNVSVEELAQTRIYWQKDKKMVLTMMSGDVNIWPEYKNRTIFDITNNLSIMILALRPSDEGTYECVVMKDEKDAFKREHLAEVT

SEQ ID NO: 784 - protein, 101 aa, Artificial Sequence
  CD80 v353 IgV
VIHVTKEVKEVATLSCGHNVSVEELAQTRIYWQKDKKMVLSMMSGEINIWPEYKNRTIFDITNNLSIMILALRPSDEGTYECVVLKYEKDAFRRVHLAEVT

SEQ ID NO: 785 - protein, 101 aa, Artificial Sequence
  CD80 v354 IgV
VIHVTKEVKEVATLSCGYNVSVEELAQTRIYWQKDKKMVLTMMSGEINIWPEYKNRTIFDITNNLSIMILALRPSDEGTYECVVLKYEKDAFKLEHLAEVT

SEQ ID NO: 786 - protein, 101 aa, Artificial Sequence
  CD80 v355 IgV
VIHVTKEVKEVATLSCGYNVSVEELAQTRIYWQKDKKIVLTMMSGDLNIWPEYKNRTIFDITNNLSIMILALRPSDEGTYECVVMKYEKDAFKREHLAEVT

SEQ ID NO: 787 - protein, 101 aa, Artificial Sequence
  CD80 v356 IgV
VIHVTKEVKEVATLSCGYNVSVEELAQTRIYWQKDKKMVLTMMSGDINIWPEYKNRTIFDITNNLSIMILALRPSDEGTYECVVLKNEKDAFKREHLAEVT

SEQ ID NO: 788 - protein, 101 aa, Artificial Sequence
  CD80 v357 IgV
VIHVTKEVKEVATLSCGYNVSVEELAQTRIYWQKDKKMVLTMMSGDLNIWPEYKNRTIFDITNNLSIMILGLRPSDEGTYECVVMKYEKDAFKREHLAEVT

SEQ ID NO: 789 - protein, 101 aa, Artificial Sequence
  CD80 v358 IgV
VIHVTKEVKEVATLSCGYNVSVEELAQTRIYWQKDKKMVLTMMSGDLNIWPEYKNRTIFDITNNLSIMILALRPSDEGTYECVVLKYEKDAFKRVHQAEVT

SEQ ID NO: 790 - protein, 101 aa, Artificial Sequence
  CD80 v359 IgV
VIHVTKEVKEVATLSCGYNVSVEELAQTRIYWQKDKKMVLTMMSGDLNIWPEFKNRTIFDITNNLSIMILGLRPSDEGTYECVVLKYEKDAFKREHLAEVT

SEQ ID NO: 791 - protein, 101 aa, Artificial Sequence
  CD80 v360 IgV
VIHVTKEVKEVATLSCGYNVSVEELAQTRIYWQKDKKMVLTMMSGDLNIWPEFKNRTIFDITNNLSIMILGLRPSDEGTYECVVLKYEKDAFRRVHLAEVT

SEQ ID NO: 792 - protein, 101 aa, Artificial Sequence
  CD80 v361 IgV
VIHVTKEVKEVATLSCGYNVSVEELAQTRIYWQKDKKMVLTMMSGDVNIWPEYKNRTIFDITNNLSIMILALRPSDEGTYECVVMKYEKDAFKREHLAEVT

SEQ ID NO: 793 - protein, 101 aa, Artificial Sequence
  CD80 v362 IgV
VIHVTKEVKEVATLSCGYNVSVEELAQTRIYWQKDKKMVLTMMSGDMNIWPEYKNRTIFDITNNLSIMILGLRPSDEGTYECVVLKYEKDAFKQVHLAEVT

SEQ ID NO: 794 - protein, 101 aa, Artificial Sequence
  CD80 v363 IgV
VIHVTKEVKEVATLSCGYNVSVEELAQTRIYWQKDKKMVLTMMSGDMNIWPEYKNRTIFDITNNLSIMILALRPSDEGTYECVVMKYEKDAFKQEHLAEVT

SEQ ID NO: 795 - protein, 101 aa, Artificial Sequence
  CD80 v364 IgV
VIHVTKEVKEVATLSCGYNVSVEELAQTRIYWQKDKKMVLTMMSGDMNIWPEYKNRTIFDITNNLSIMILALRPSDEGMYECVVMKYEKDAFKREHLAEVT

SEQ ID NO: 796 - protein, 101 aa, Artificial Sequence
  CD80 v365 IgV
VIHVTKEVKEVATLSCGYNVSDEELAQTRIYWQKDKKMVLTMMSGDVKIWPEYKNRTIFDITNNLSIMILALRPSDEGTYECVVLKYEKDAFKREHLAEVT

SEQ ID NO: 797 - protein, 101 aa, Artificial Sequence
  CD80 v366 IgV
VIHVTKEVKEVATLSCGHNVSVEELALTRIYWLKDKKMVLSMMSGDVKIWPEYKNRTIFDITNNLSIMILALRPSDEGTYECVVMKYEKDAFKREHLAEVT

SEQ ID NO: 798 - protein, 101 aa, Artificial Sequence
  CD80 v367 IgV
VIHVTKEVKEVATLSCGHNVSVEELAQTRIYWLKDKKMVLTMMSGDVNIWPEYKNRTIFDISNNLSIMILALRPSDEGTYECVVMKYEKDAFKREHLAEVT

SEQ ID NO: 799 - protein, 101 aa, Artificial Sequence
  CD80 v368 IgV
VIHVTKEVKEVATLSCGHNVSVEELAQTRIYWRKDKKIVLTMMSGDLNIWPEYKNRTIFDITNNLSIMILALRPSDEGTYECVVLKYEKDAFKREHLAEVT

SEQ ID NO: 800 - protein, 101 aa, Artificial Sequence
  CD80 v369 IgV
VIHVTKEVKEVATLSCGHNVSVEELAQTCIYWQKDKKMVLTMMSGDLNIWPEYKNRTIFDITNNLSIMILGLRPSDEGTYECVVMKYEKDAFKREHLAEVT

SEQ ID NO: 801 - protein, 101 aa, Artificial Sequence
  CD80 v370 IgV
VIHVTKEVKEVATLSCGHNVPVEELAQTRIYWQKDKEMVLTMMSGEINIWPEYKNRTIFDITNNLSIMILALRPSDEGTYECVVLKYEKDAFKREHLAEVT

SEQ ID NO: 802 - protein, 101 aa, Artificial Sequence
  CD80 v371 IgV
VIHVTKEVKEVATLSCGHNVPVEELAQTRIYWQKDKEMVLTMMSGEINIWPEYKNRTIFDITNNLSIMILALRPSDEGTYECVVLKYEKDAFKLEHLAEVT

SEQ ID NO: 803 - protein, 101 aa, Artificial Sequence
  CD80 v372 IgV
VIHVTKEVKEVARLSCGHNVSVEELAQTRIYWQKDKKMVLTMMSGDLNIWPEYKNRTIFDITNNLSIMILALRPSDEGTYECVVLKYEKDAFKREHLAEVT

SEQ ID NO: 804 - protein, 101 aa, Artificial Sequence
  CD80 v373 IgV
VIHVTKEVKEVARLSCGYNVSVEELAQTRIYWQKDKKMVLTMMSGDMNIWPEYKNRTIFDITNNLSIMILALRPSDEGTYECVVMKYEKDAFKQEHLAEVT

SEQ ID NO: 805 - protein, 101 aa, Artificial Sequence
  CD80 v374 IgV
VIHVTKEVKEVARLSCGHNVSVEELALTRIYWLKDKKMVLSMMSGDVKIWPEYKNRTIFDITNNLSIMILALRPSDEGTYECVVMKYEKDAFKREHLAEVT

SEQ ID NO: 806 - protein, 101 aa, Artificial Sequence
  CD80 v375 IgV
VIHVTKEVKEVARLSCGHNVSVEELAQTRIYWLKDKKMVLTMMSGDLNIWPEYKNRTIFDITNNLSIMILALRPSDEGTYECVVMKYEKDAFKREHLAEVT

SEQ ID NO: 807 - protein, 101 aa, Artificial Sequence
  CD80 v376 IgV
VIHVTKEVKEVARLSCGHNVSVEELAQTRIYWLKDKKMVLTMMSGDVNIWPEYKNRTIFDISNNLSIMILALRPSDEGTYECVVMKYEKDAFKREHLAEVT

SEQ ID NO: 808 - protein, 101 aa, Artificial Sequence
  CD80 v377 IgV
VIHVTKEVKEVARLSCGHNVSVEELAQTRIYWRKDKKIVLTMMSGDLNIWPEYKNRTIFDITNNLSIMILALRPSDEGTYECVVLKYEKDAFKREHLAEVT

SEQ ID NO: 809 - protein, 101 aa, Artificial Sequence
  CD80 v378 IgV
VIHVTKEVKEVARLSCGHNVSVEELAQTRIYWRKDKKIVLTMMSGDLNIWPEYKNRTIFDITNNLSIMILALRPSDEGTYECVVLKYEKDAFKRVHQAEVT

SEQ ID NO: 810 - protein, 101 aa, Artificial Sequence
  CD80 v379 IgV
VIHVTKEVKEVARLSCGHNVSVEELAQTRIYWRKDKKIVLTMMSGDLNIWPEYKNRTIFDITNNLSIMILALRPSDEGTYECVVMKYEKDAFKREHLAEVT

SEQ ID NO: 811 - protein, 101 aa, Artificial Sequence
  CD80 v380 IgV
VIHVTKEVKEVARLSCGHNVSVEELAQTRIYWRKDKKIVLTMMSGDLNIWPEYKNRTIFDITNNLSIMILALRPSDEGTYECVVMKYEKDAFKQEHLAEVT

SEQ ID NO: 812 - protein, 101 aa, Artificial Sequence
  CD80 v381 IgV
VIHVTKEVKEVARLSCGHNVSVEELAQTRIYWRKDKKMVLTMMSGDLNIWPEYKNRTIFDITNNLSIMILALRPSDEGTYECVVLKYEKDAFKREHLAEVT

SEQ ID NO: 813 - protein, 101 aa, Artificial Sequence
  CD80 v382 IgV
VIHVTKEVKEVARLSCGHNVSVEELAQTRIYWRKDKKMVLTMMSGDLNIWPEYKNRTIFDITNNLSIMILALRPSDEGTYECVVMKYEKDAFKREHLAEVT

SEQ ID NO: 814 - protein, 101 aa, Artificial Sequence
  CD80 v383 IgV
VIHVTKEVKEVATLSCGHNVSDEDLAQTRIYWQKDKKMVLTMMSGDLNIWPEYKNRTIFDITNNLSIMILALRPSDEGTYECVVLKYEKDAFKREHLAEVT

SEQ ID NO: 815 - protein, 101 aa, Artificial Sequence
  CD80 v384 IgV
VIHVTKEVKEVATLSCGHNVSDEDLAQTRIYWQKDKKMVLTMMSGDLNIWPEYKNRTIFDITNNLSIMILALRPSDEGTYECVVMKYEKGAFKREHLAEVT

SEQ ID NO: 816 - protein, 101 aa, Artificial Sequence
  CD80 v385 IgV
VIHVTKEVKEVATLSCGHNVSDEDLAQTRIYWQKDKKMVLTMMSGDVNIWPEYKNRTIFDITNNLSIMILALRPSDEGTYECVVLKYEKDAFKREHLAEVT

SEQ ID NO: 817 - protein, 101 aa, Artificial Sequence
  CD80 v386 IgV
VIHVTKEVKEVATLSCGHNVSVEELAQTRIYWQKEKKMVLTMMSGVMNIWPEYKNRTIFDITNNLSIVILALRPSDEGTYECVVLKYEKDAFKREHLAEVT

SEQ ID NO: 818 - protein, 101 aa, Artificial Sequence
  CD80 v387 IgV
VIHVTKEVKEVATLSCGHNVSVEELAQTRIYWQKEKKMVLTMMSGDLNIWPEYKNRTIFDITNNLSIVILALRPSDEGTYECVVLKYEKDAFKREHLAEVT

SEQ ID NO: 819 - protein, 101 aa, Artificial Sequence
  CD80 v388 IgV
VIHVTKEVKEVATLSCGHNVSVEELAQTRIYWQKEKKMVLTMMSGDMNIWPEYKNRTIFDITNNLSIMILALRPSDEGTYECVVLKYEKDAFKREHLAEVT

SEQ ID NO: 820 - protein, 101 aa, Artificial Sequence
  CD80 v389 IgV
VIHVTKEVKEVATLSCGHNVSVEELAQTRIYWQKEKKMVLTMMSGDMNIWPEYKNRTIFDITNNLSIVILALRPSDEGTYECVVQKYEKDAFKREHLAEVT

SEQ ID NO: 821 - protein, 101 aa, Artificial Sequence
  CD80 v390 IgV
VIHVTKEVKEVATLSCGHNVSVEELAQTRIYWQKDKKMVLTMMSGVMNIWPEYKNRTIFDITNNLSIVILALRPSDEGTYECVVLKYEKDAFKREHLAEVT

SEQ ID NO: 822 - protein, 101 aa, Artificial Sequence
  CD80 v392 IgV
VIHVTKEVKEVATLSCGHNVSVEELAQTRIYWQKDKKMVLTMMSGDMNIWPEYKNRTIFDITNNLSIMILALRPSDEGTYECVVLKYEKDAFKREHLAEVT

SEQ ID NO: 823 - protein, 101 aa, Artificial Sequence
  CD80 v393 IgV
VIHVTKEVKEVATLSCGHNVSVEELAQTRIYWQKDKKMVLTMMSGDMNIWPEYKNRTIFDITNNLSIVILALRPSDEGTYECVVQKYEKDAFKREHLAEVT

SEQ ID NO: 824 - protein, 101 aa, Artificial Sequence
  CD80 v394 IgV
VIHVTKEVKEVATLSCGHNVSVEELAQTRIYWQKEKKMVLTMMSGVLNIWPEYKNRTIFDITNNLSIVILALRPSDEGTYECVVLKYEKDAFKREHLAEVT

SEQ ID NO: 825 - protein, 101 aa, Artificial Sequence
  CD80 v395 IgV
VIHVTKEVKEVATLSCGHNVSVEELAQTRIYWQKEKKMVLTMMSGVMNIWPEYKNRTIFDITNNLSIMILALRPSDEGTYECVVLKYEKDAFKREHLAEVT

SEQ ID NO: 826 - protein, 101 aa, Artificial Sequence
  CD80 v396 IgV
VIHVTKEVKEVATLSCGHNVSVEELAQTRIYWQKEKKMVLTMMSGVMNIWPEYKNRTIFDITNNLSIVILALRPSDEGTYECVVQKYEKDAFKREHLAEVT

SEQ ID NO: 827 - protein, 101 aa, Artificial Sequence
  CD80 v397 IgV
VIHVTKEVKEVATLSCGHNVSVEELAQTRIYWQKEKKMVLTMMSGDLNIWPEYKNRTIFDITNNLSIMILALRPSDEGTYECVVLKYEKDAFKREHLAEVT

SEQ ID NO: 828 - protein, 101 aa, Artificial Sequence
  CD80 v398 IgV
VIHVTKEVKEVATLSCGHNVSVEELAQTRIYWQKEKKMVLTMMSGDLNIWPEYKNRTIFDITNNLSIVILALRPSDEGTYECVVQKYEKDAFKREHLAEVT

SEQ ID NO: 829 - protein, 101 aa, Artificial Sequence
  CD80 v399 IgV
VIHVTKEVKEVATLSCGHNVSVEELAQTRIYWQKEKKMVLTMMSGDMNIWPEYKNRTIFDITNNLSIMILALRPSDEGTYECVVQKYEKDAFKREHLAEVT

SEQ ID NO: 830 - protein, 101 aa, Artificial Sequence
  CD80 v400 IgV
VIHVTKEVKEVATLSCGHNVSVEELAQTRIYWQKDKKMVLTMMSGVLNIWPEYKNRTIFDITNNLSIVILALRPSDEGTYECVVLKYEKDAFKREHLAEVT

SEQ ID NO: 831 - protein, 101 aa, Artificial Sequence
  CD80 v401 IgV
VIHVTKEVKEVATLSCGHNVSVEELAQTRIYWQKDKKMVLTMMSGVMNIWPEYKNRTIFDITNNLSIMILALRPSDEGTYECVVLKYEKDAFKREHLAEVT

SEQ ID NO: 832 - protein, 101 aa, Artificial Sequence; identical to SEQ ID NO: 129
  CD80 v402 IgV

SEQ ID NO: 833 - protein, 101 aa, Artificial Sequence
  CD80 v403 IgV
VIHVTKEVKEVATLSCGHNVSVEELAQTRIYWQKDKKMVLTMMSGDMNIWPEYKNRTIFDITNNLSIMILALRPSDEGTYECVVQKYEKDAFKREHLAEVT

SEQ ID NO: 834 - protein, 101 aa, Artificial Sequence
  CD80 v404 IgV
VIHVTKEVKEVATLSCGHNVSVEELAQTRIYWQKEKKMVLTMMSGVLNIWPEYKNRTIFDITNNLSIMILALRPSDEGTYECVVLKYEKDAFKREHLAEVT

SEQ ID NO: 835 - protein, 101 aa, Artificial Sequence
  CD80 v405 IgV
VIHVTKEVKEVATLSCGHNVSVEELAQTRIYWQKEKKMVLTMMSGVLNIWPEYKNRTIFDITNNLSIVILALRPSDEGTYECVVQKYEKDAFKREHLAEVT

SEQ ID NO: 836 - protein, 101 aa, Artificial Sequence
  CD80 v406 IgV
VIHVTKEVKEVATLSCGHNVSVEELAQTRIYWQKEKKMVLTMMSGVMNIWPEYKNRTIFDITNNLSIMILALRPSDEGTYECVVQKYEKDAFKREHLAEVT

SEQ ID NO: 837 - protein, 101 aa, Artificial Sequence
  CD80 v407 IgV
VIHVTKEVKEVATLSCGHNVSVEELAQTRIYWQKEKKMVLTMMSGDLNIWPEYKNRTIFDITNNLSIMILALRPSDEGTYECVVQKYEKDAFKREHLAEVT

SEQ ID NO: 838 - protein, 101 aa, Artificial Sequence
  CD80 v408 IgV
VIHVTKEVKEVATLSCGHNVSVEELAQTRIYWQKDKKMVLTMMSGVLNIWPEYKNRTIFDITNNLSIVILALRPSDEGTYECVVQKYEKDAFKREHLAEVT

SEQ ID NO: 839 - protein, 101 aa, Artificial Sequence
  CD80 v409 IgV
VIHVTKEVKEVATLSCGHNVSVEELAQTRIYWQKDKKMVLTMMSGVMNIWPEYKNRTIFDITNNLSIMILALRPSDEGTYECVVQKYEKDAFKREHLAEVT

SEQ ID NO: 840 - protein, 101 aa, Artificial Sequence
  CD80 v410 IgV
VIHVTKEVKEVATLSCGHNVSVEELAQTRIYWQKDKKMVLTMMSGDLNIWPEYKNRTIFDITNNLSIMILALRPSDEGTYECVVQKYEKDAFKREHLAEVT

SEQ ID NO: 841 - protein, 101 aa, Artificial Sequence
  CD80 v411 IgV
VIHVTKEVKEVATLSCGHNVSVEELAQTRIYWQKEKKMVLTMMSGVLNIWPEYKNRTIFDITNNLSIMILALRPSDEGTYECVVQKYEKDAFKREHLAEVT

SEQ ID NO: 842 - protein, 101 aa, Artificial Sequence
  CD80 v412 IgV
VIHVTKEVKEVATLSCGHNVSVEELAQTRIYWQKEKKMVLTMMSGDVNIWPEYKNRTIFDITNNLSIVILALRPSDEGTYECVVLKYEKDAFKREHLAEVT

SEQ ID NO: 843 - protein, 101 aa, Artificial Sequence
  CD80 v413 IgV
VIHVTKEVKEVATLSCGHNVSVEELAQTRIYWQKEKKMVLTMMSGDMKIWPEYKNRTIFDITNNLSIVILALRPSDEGTYECVVLKYEKDAFKREHLAEVT

SEQ ID NO: 844 - protein, 101 aa, Artificial Sequence
  CD80 v414 IgV
VIHVTKEVKEVATLSCGHNVSVEELAQTRIYWQKEKKMVLTMMSGDMNIWPEYKNRTIFDITNNLSIVILALRPSDEGTYECVVLKYENDAFKREHLAEVT

SEQ ID NO: 845 - protein, 101 aa, Artificial Sequence
  CD80 v415 IgV
VIHVTKEVKEVATLSCGHNVSVEELAQTRIYWQKDKKMVLTMMSGDMKIWPEYKNRTIFDITNNLSIVILALRPSDEGTYECVVLKYEKDAFKREHLAEVT

SEQ ID NO: 846 - protein, 101 aa, Artificial Sequence
  CD80 v416 IgV
VIHVTKEVKEVATLSCGHNVSVEELAQTRIYWQKDKKMVLTMMSGDMNIWPEYKNRTIFDITNNLSIVILALRPSDEGTYECVVLKYENDAFKREHLAEVT

SEQ ID NO: 847 - protein, 101 aa, Artificial Sequence
  CD80 v417 IgV
VIHVTKEVKEVATLSCGHNVSVEELAQTRIYWQKEKKMVLTMMSGDVKIWPEYKNRTIFDITNNLSIVILALRPSDEGTYECVVLKYEKDAFKREHLAEVT

SEQ ID NO: 848 - protein, 101 aa, Artificial Sequence
  CD80 v418 IgV
VIHVTKEVKEVATLSCGHNVSVEELAQTRIYWQKEKKMVLTMMSGDVNIWPEYKNRTIFDITNNLSIMILALRPSDEGTYECVVLKYEKDAFKREHLAEVT

SEQ ID NO: 849 - protein, 101 aa, Artificial Sequence
  CD80 v419 IgV
VIHVTKEVKEVATLSCGHNVSVEELAQTRIYWQKEKKMVLTMMSGDVNIWPEYKNRTIFDITNNLSIVILALRPSDEGTYECVVLKYENDAFKREHLAEVT

SEQ ID NO: 850 - protein, 101 aa, Artificial Sequence
  CD80 v420 IgV
VIHVTKEVKEVATLSCGHNVSVEELAQTRIYWQKEKKMVLTMMSGDMKIWPEYKNRTIFDITNNLSIMILALRPSDEGTYECVVLKYEKDAFKREHLAEVT

SEQ ID NO: 851 - protein, 101 aa, Artificial Sequence
  CD80 v421 IgV
VIHVTKEVKEVATLSCGHNVSVEELAQTRIYWQKEKKMVLTMMSGDMKIWPEYKNRTIFDITNNLSIVILALRPSDEGTYECVVLKYENDAFKREHLAEVT

SEQ ID NO: 852 - protein, 101 aa, Artificial Sequence
  CD80 v422 IgV
VIHVTKEVKEVATLSCGHNVSVEELAQTRIYWQKEKKMVLTMMSGDMNIWPEYKNRTIFDITNNLSIMILALRPSDEGTYECVVLKYENDAFKREHLAEVT

SEQ ID NO: 853 - protein, 101 aa, Artificial Sequence
  CD80 v423 IgV
VIHVTKEVKEVATLSCGHNVSVEELAQTRIYWQKDKKMVLTMMSGDVKIWPEYKNRTIFDITNNLSIVILALRPSDEGTYECVVLKYEKDAFKREHLAEVT

SEQ ID NO: 854 - protein, 101 aa, Artificial Sequence
  CD80 v424 IgV
VIHVTKEVKEVATLSCGHNVSVEELAQTRIYWQKDKKMVLTMMSGDVNIWPEYKNRTIFDITNNLSIMILALRPSDEGTYECVVLKYEKDAFKREHLAEVT

SEQ ID NO: 855 - protein, 101 aa, Artificial Sequence
  CD80 v425 IgV
VIHVTKEVKEVATLSCGHNVSVEELAQTRIYWQKDKKMVLTMMSGDVNIWPEYKNRTIFDITNNLSIVILALRPSDEGTYECVVLKYENDAFKREHLAEVT

SEQ ID NO: 856 - protein, 101 aa, Artificial Sequence
  CD80 v426 IgV
VIHVTKEVKEVATLSCGHNVSVEELAQTRIYWQKDKKMVLTMMSGDMKIWPEYKNRTIFDITNNLSIMILALRPSDEGTYECVVLKYEKDAFKREHLAEVT

SEQ ID NO: 857 - protein, 101 aa, Artificial Sequence
  CD80 v427 IgV
VIHVTKEVKEVATLSCGHNVSVEELAQTRIYWQKDKKMVLTMMSGDMKIWPEYKNRTIFDITNNLSIVILALRPSDEGTYECVVLKYENDAFKREHLAEVT

SEQ ID NO: 858 - protein, 101 aa, Artificial Sequence
  CD80 v428 IgV
VIHVTKEVKEVATLSCGHNVSVEELAQTRIYWQKDKKMVLTMMSGDMNIWPEYKNRTIFDITNNLSIMILALRPSDEGTYECVVLKYENDAFKREHLAEVT

SEQ ID NO: 859 - protein, 101 aa, Artificial Sequence
  CD80 v429 IgV
VIHVTKEVKEVATLSCGHNVSVEELAQTRIYWQKEKKMVLTMMSGDVKIWPEYKNRTIFDITNNLSIMILALRPSDEGTYECVVLKYEKDAFKREHLAEVT

SEQ ID NO: 860 - protein, 101 aa, Artificial Sequence
  CD80 v430 IgV
VIHVTKEVKEVATLSCGHNVSVEELAQTRIYWQKEKKMVLTMMSGDVKIWPEYKNRTIFDITNNLSIVILALRPSDEGTYECVVLKYENDAFKREHLAEVT

SEQ ID NO: 861 - protein, 101 aa, Artificial Sequence
  CD80 v431 IgV
VIHVTKEVKEVATLSCGHNVSVEELAQTRIYWQKEKKMVLTMMSGDVNIWPEYKNRTIFDITNNLSIMILALRPSDEGTYECVVLKYENDAFKREHLAEVT

SEQ ID NO: 862 - protein, 101 aa, Artificial Sequence
  CD80 v432 IgV
VIHVTKEVKEVATLSCGHNVSVEELAQTRIYWQKEKKMVLTMMSGDMKIWPEYKNRTIFDITNNLSIMILALRPSDEGTYECVVLKYENDAFKREHLAEVT

SEQ ID NO: 863 - protein, 101 aa, Artificial Sequence
  CD80 v433 IgV
VIHVTKEVKEVATLSCGHNVSVEELAQTRIYWQKDKKMVLTMMSGDVKIWPEYKNRTIFDITNNLSIVILALRPSDEGTYECVVLKYENDAFKREHLAEVT

SEQ ID NO: 864 - protein, 101 aa, Artificial Sequence
  CD80 v434 IgV
VIHVTKEVKEVATLSCGHNVSVEELAQTRIYWQKDKKMVLTMMSGDVNIWPEYKNRTIFDITNNLSIMILALRPSDEGTYECVVLKYENDAFKREHLAEVT

SEQ ID NO: 865 - protein, 101 aa, Artificial Sequence
  CD80 v435 IgV
VIHVTKEVKEVATLSCGHNVSVEELAQTRIYWQKDKKMVLTMMSGDMKIWPEYKNRTIFDITNNLSIMILALRPSDEGTYECVVLKYENDAFKREHLAEVT

SEQ ID NO: 866 - protein, 101 aa, Artificial Sequence
  CD80 v436 IgV
VIHVTKEVKEVATLSCGHNVSVEELAQTRIYWQKEKKMVLTMMSGDVKIWPEYKNRTIFDITNNLSIMILALRPSDEGTYECVVLKYENDAFKREHLAEVT

SEQ ID NO: 867 - protein, 101 aa, Artificial Sequence
  CD80 v437 IgV
VIHVTKEVKEVATLSCGHNVSVEELAQTRIYWQKDKKMVLTMMSGVVKIWPEYKNRTIFDITNNLSIMILALRPSDEGTYECVVLKYEKDAFKREHLAEVT

SEQ ID NO: 868 - protein, 101 aa, Artificial Sequence
  CD80 v438 IgV
VIHVTKEVKEVATLSCGHNVSVEELAQTRIYWQKDKKMVLTMMSGVVNIWPEYKNRTIFDITNNLSIMILALRPSDEGTYECVVQKYEKDAFKREHLAEVT

SEQ ID NO: 869 - protein, 101 aa, Artificial Sequence
  CD80 v439 IgV
VIHVTKEVKEVATLSCGHNVSVEELAQTRIYWQKDKKMVLTMMSGVVNIWPEYKNRTIFDITNNLSIMILALRPSDEGTYECVVLKYENDAFKREHLAEVT

SEQ ID NO: 870 - protein, 101 aa, Artificial Sequence
  CD80 v440 IgV
VIHVTKEVKEVATLSCGHNVSVEELAQTRIYWQKDKKMVLTMMSGDVKIWPEYKNRTIFDITNNLSIMILALRPSDEGTYECVVQKYEKDAFKREHLAEVT

SEQ ID NO: 871 - protein, 101 aa, Artificial Sequence
  CD80 v441 IgV
VIHVTKEVKEVATLSCGHNVSVEELAQTRIYWQKDKKMVLTMMSGDVNIWPEYKNRTIFDITNNLSIMILALRPSDEGTYECVVQKYENDAFKREHLAEVT

SEQ ID NO: 872 - protein, 101 aa, Artificial Sequence
  CD80 v442 IgV
VIHVTKEVKEVATLSCGHNVSVEELEQTRIYWQKDKKMVLTMMSGDLNIWPEYKNRTIFDITNNLSIMILGLRPSDEGTYECVVLKYEKGAFKREHLAEVT

SEQ ID NO: 873 - protein, 101 aa, Artificial Sequence
  CD80 v443 IgV
VIHVTKEVKEVATLSCGYNVSVEELAQTRIYWQKDKKMVLTMMSGDLNIWPEYKNRTIFDITNNLSIMILGLRPSDEGTYECVVLKYEKGAFKREHLAEVT

SEQ ID NO: 874 - protein, 101 aa, Artificial Sequence
  CD80 v444 IgV
VIHVTKEVKEVATLSCGYNVSVEELEQTRIYWQKEKKMVLTMMSGDLNIWPEYKNRTIFDITNNLSIMILGLRPSDEGTYECVVLKYEKGAFKREHLAEVT

SEQ ID NO: 875 - protein, 101 aa, Artificial Sequence
  CD80 v445 IgV
VIHVTKEVKEVATLSCGYNVSVEELEQTRIYWQKDKKMVLTMMSGDMNIWPEYKNRTIFDITNNLSIMILGLRPSDEGTYECVVLKYEKGAFKREHLAEVT

SEQ ID NO: 876 - protein, 101 aa, Artificial Sequence
  CD80 v446 IgV
VIHVTKEVKEVATLSCGYNVSVEELEQTRIYWQKDKKMVLTMMSGDLNIWPEYKNRTIFDITNNLSIVILGLRPSDEGTYECVVLKYEKGAFKREHLAEVT

SEQ ID NO: 877 - protein, 101 aa, Artificial Sequence
  CD80 v447 IgV
VIHVTKEVKEVATLSCGYNVSVEELEQTRIYWQKDKKMVLTMMSGDLNIWPEYKNRTIFDITNNLSIMILALRPSDEGTYECVVLKYEKGAFKREHLAEVT

SEQ ID NO: 878 - protein, 101 aa, Artificial Sequence
  CD80 v448 IgV
VIHVTKEVKEVATLSCGYNVSVEELEQTRIYWQKDKKMVLTMMSGDLNIWPEYKNRTIFDITNNLSIMILGLRPSDEGTYECVVLKYEKDAFKREHLAEVT

SEQ ID NO: 879 - protein, 101 aa, Artificial Sequence
  CD80 v449 IgV
VIHVTKEVKEVATLSCGHNVSVEELAQTRIYWQKDKKMVLTMMSGDLNIWPEYKNRTIFDITNNLSIMILGLRPSDEGTYECVVLKYEKGAFKREHLAEVT

SEQ ID NO: 880 - protein, 101 aa, Artificial Sequence
  CD80 v450 IgV
VIHVTKEVKEVATLSCGYNVSVEELAQTRIYWQKEKKMVLTMMSGDLNIWPEYKNRTIFDITNNLSIMILGLRPSDEGTYECVVLKYEKGAFKREHLAEVT

SEQ ID NO: 881 - protein, 101 aa, Artificial Sequence
  CD80 v451 IgV
VIHVTKEVKEVATLSCGYNVSVEELEQTRIYWQKEKKMVLTMMSGDMNIWPEYKNRTIFDITNNLSIMILGLRPSDEGTYECVVLKYEKGAFKREHLAEVT

SEQ ID NO: 882 - protein, 101 aa, Artificial Sequence
  CD80 v452 IgV
VIHVTKEVKEVATLSCGYNVSVEELEQTRIYWQKDKKMVLTMMSGDMNIWPEYKNRTIFDITNNLSIVILGLRPSDEGTYECVVLKYEKGAFKREHLAEVT

SEQ ID NO: 883 - protein, 101 aa, Artificial Sequence
  CD80 v453 IgV
VIHVTKEVKEVATLSCGYNVSVEELEQTRIYWQKDKKMVLTMMSGDLNIWPEYKNRTIFDITNNLSIVILALRPSDEGTYECVVLKYEKGAFKREHLAEVT

SEQ ID NO: 884 - protein, 101 aa, Artificial Sequence
  CD80 v454 IgV
VIHVTKEVKEVATLSCGYNVSVEELEQTRIYWQKDKKMVLTMMSGDLNIWPEYKNRTIFDITNNLSIMILALRPSDEGTYECVVLKYEKDAFKREHLAEVT

SEQ ID NO: 885 - protein, 101 aa, Artificial Sequence
  CD80 v455 IgV
VIHVTKEVKEVATLSCGHNVSVEELEQTRIYWQKEKKMVLTMMSGDLNIWPEYKNRTIFDITNNLSIMILGLRPSDEGTYECVVLKYEKGAFKREHLAEVT

SEQ ID NO: 886 - protein, 101 aa, Artificial Sequence
  CD80 v456 IgV
VIHVTKEVKEVATLSCGHNVSVEELEQTRIYWQKDKKMVLTMMSGDMNIWPEYKNRTIFDITNNLSIMILGLRPSDEGTYECVVLKYEKGAFKREHLAEVT

SEQ ID NO: 887 - protein, 101 aa, Artificial Sequence
  CD80 v457 IgV
VIHVTKEVKEVATLSCGHNVSVEELEQTRIYWQKDKKMVLTMMSGDLNIWPEYKNRTIFDITNNLSIVILGLRPSDEGTYECVVLKYEKGAFKREHLAEVT

SEQ ID NO: 888 - protein, 101 aa, Artificial Sequence
  CD80 v458 IgV
VIHVTKEVKEVATLSCGHNVSVEELEQTRIYWQKDKKMVLTMMSGDLNIWPEYKNRTIFDITNNLSIMILALRPSDEGTYECVVLKYEKGAFKREHLAEVT

SEQ ID NO: 889 - protein, 101 aa, Artificial Sequence
  CD80 v459 IgV
VIHVTKEVKEVATLSCGHNVSVEELEQTRIYWQKDKKMVLTMMSGDLNIWPEYKNRTIFDITNNLSIMILGLRPSDEGTYECVVLKYEKDAFKREHLAEVT

SEQ ID NO: 890 - protein, 101 aa, Artificial Sequence
  CD80 v460 IgV
VIHVTKEVKEVATLSCGYNVSVEELAQTRIYWQKDKKMVLTMMSGDMNIWPEYKNRTIFDITNNLSIMILGLRPSDEGTYECVVLKYEKGAFKREHLAEVT

SEQ ID NO: 891 - protein, 101 aa, Artificial Sequence
  CD80 v461 IgV
VIHVTKEVKEVATLSCGYNVSVEELAQTRIYWQKDKKMVLTMMSGDLNIWPEYKNRTIFDITNNLSIVILGLRPSDEGTYECVVLKYEKGAFKREHLAEVT

SEQ ID NO: 892 - protein, 101 aa, Artificial Sequence
  CD80 v462 IgV
VIHVTKEVKEVATLSCGYNVSVEELAQTRIYWQKDKKMVLTMMSGDLNIWPEYKNRTIFDITNNLSIMILALRPSDEGTYECVVLKYEKGAFKREHLAEVT

SEQ ID NO: 893 - protein, 101 aa, Artificial Sequence
  CD80 v463 IgV
VIHVTKEVKEVATLSCGYNVSVEELAQTRIYWQKDKKMVLTMMSGDLNIWPEYKNRTIFDITNNLSIMILGLRPSDEGTYECVVLKYEKDAFKREHLAEVT

SEQ ID NO: 894 - protein, 101 aa, Artificial Sequence
  CD80 v464 IgV
VIHVTKEVKEVATLSCGYNVSVEELEQTRIYWQKEKKMVLTMMSGDLNIWPEYKNRTIFDITNNLSIVILGLRPSDEGTYECVVLKYEKGAFKREHLAEVT

SEQ ID NO: 895 - protein, 101 aa, Artificial Sequence
  CD80 v465 IgV
VIHVTKEVKEVATLSCGYNVSVEELEQTRIYWQKEKKMVLTMMSGDLNIWPEYKNRTIFDITNNLSIMILALRPSDEGTYECVVLKYEKGAFKREHLAEVT

SEQ ID NO: 896 - protein, 101 aa, Artificial Sequence
  CD80 v466 IgV
VIHVTKEVKEVATLSCGYNVSVEELEQTRIYWQKEKKMVLTMMSGDLNIWPEYKNRTIFDITNNLSIMILGLRPSDEGTYECVVLKYEKDAFKREHLAEVT

SEQ ID NO: 897 - protein, 101 aa, Artificial Sequence
  CD80 v467 IgV
VIHVTKEVKEVATLSCGYNVSVEELEQTRIYWQKDKKMVLTMMSGDMNIWPEYKNRTIFDITNNLSIMILALRPSDEGTYECVVLKYEKGAFKREHLAEVT

SEQ ID NO: 898 - protein, 101 aa, Artificial Sequence
  CD80 v468 IgV
VIHVTKEVKEVATLSCGYNVSVEELEQTRIYWQKDKKMVLTMMSGDMNIWPEYKNRTIFDITNNLSIMILGLRPSDEGTYECVVLKYEKDAFKREHLAEVT

SEQ ID NO: 899 - protein, 101 aa, Artificial Sequence
  CD80 v469 IgV
VIHVTKEVKEVATLSCGYNVSVEELEQTRIYWQKDKKMVLTMMSGDLNIWPEYKNRTIFDITNNLSIVILGLRPSDEGTYECVVLKYEKDAFKREHLAEVT

SEQ ID NO: 900 - protein, 101 aa, Artificial Sequence
  CD80 v470 IgV
VIHVTKEVKEVATLSCGHNVSVEELAQTRIYWQKEKKMVLTMMSGDLNIWPEYKNRTIFDITNNLSIMILGLRPSDEGTYECVVLKYEKGAFKREHLAEVT

SEQ ID NO: 901 - protein, 101 aa, Artificial Sequence
  CD80 v471 IgV
VIHVTKEVKEVATLSCGYNVSVEELAQTRIYWQKEKKMVLTMMSGDMNIWPEYKNRTIFDITNNLSIMILGLRPSDEGTYECVVLKYEKGAFKREHLAEVT

SEQ ID NO: 902 - protein, 101 aa, Artificial Sequence
  CD80 v472 IgV
VIHVTKEVKEVATLSCGYNVSVEELEQTRIYWQKEKKMVLTMMSGDMNIWPEYKNRTIFDITNNLSIVILGLRPSDEGTYECVVLKYEKGAFKREHLAEVT

SEQ ID NO: 903 - protein, 101 aa, Artificial Sequence
  CD80 v473 IgV
VIHVTKEVKEVATLSCGYNVSVEELEQTRIYWQKDKKMVLTMMSGDMNIWPEYKNRTIFDITNNLSIVILALRPSDEGTYECVVLKYEKGAFKREHLAEVT

SEQ ID NO: 904 - protein, 101 aa, Artificial Sequence
  CD80 v474 IgV
VIHVTKEVKEVATLSCGYNVSVEELEQTRIYWQKDKKMVLTMMSGDLNIWPEYKNRTIFDITNNLSIVILALRPSDEGTYECVVLKYEKDAFKREHLAEVT

SEQ ID NO: 905 - protein, 101 aa, Artificial Sequence
  CD80 v475 IgV
VIHVTKEVKEVATLSCGHNVSVEELAQTRIYWQKDKKMVLTMMSGDMNIWPEYKNRTIFDITNNLSIMILGLRPSDEGTYECVVLKYEKGAFKREHLAEVT

SEQ ID NO: 906 - protein, 101 aa, Artificial Sequence
  CD80 v476 IgV
VIHVTKEVKEVATLSCGHNVSVEELAQTRIYWQKDKKMVLTMMSGDLNIWPEYKNRTIFDITNNLSIVILGLRPSDEGTYECVVLKYEKGAFKREHLAEVT

SEQ ID NO: 907 - protein, 101 aa, Artificial Sequence
  CD80 v477 IgV
VIHVTKEVKEVATLSCGHNVSVEELAQTRIYWQKDKKMVLTMMSGDLNIWPEYKNRTIFDITNNLSIMILALRPSDEGTYECVVLKYEKGAFKREHLAEVT

SEQ ID NO: 908 - protein, 101 aa, Artificial Sequence
  CD80 v478 IgV
VIHVTKEVKEVATLSCGHNVSVEELAQTRIYWQKDKKMVLTMMSGDLNIWPEYKNRTIFDITNNLSIMILGLRPSDEGTYECVVLKYEKDAFKREHLAEVT

SEQ ID NO: 909 - protein, 101 aa, Artificial Sequence
  CD80 v479 IgV
VIHVTKEVKEVATLSCGHNVSVEELEQTRIYWQKEKKMVLTMMSGDMNIWPEYKNRTIFDITNNLSIMILGLRPSDEGTYECVVLKYEKGAFKREHLAEVT

SEQ ID NO: 910 - protein, 101 aa, Artificial Sequence
  CD80 v480 IgV
VIHVTKEVKEVATLSCGHNVSVEELEQTRIYWQKEKKMVLTMMSGDLNIWPEYKNRTIFDITNNLSIVILGLRPSDEGTYECVVLKYEKGAFKREHLAEVT

SEQ ID NO: 911 - protein, 101 aa, Artificial Sequence
  CD80 v481 IgV
VIHVTKEVKEVATLSCGHNVSVEELEQTRIYWQKEKKMVLTMMSGDLNIWPEYKNRTIFDITNNLSIMILALRPSDEGTYECVVLKYEKGAFKREHLAEVT

SEQ ID NO: 912 - protein, 101 aa, Artificial Sequence
  CD80 v482 IgV
VIHVTKEVKEVATLSCGHNVSVEELEQTRIYWQKEKKMVLTMMSGDLNIWPEYKNRTIFDITNNLSIMILGLRPSDEGTYECVVLKYEKDAFKREHLAEVT

SEQ ID NO: 913 - protein, 101 aa, Artificial Sequence
  CD80 v483 IgV
VIHVTKEVKEVATLSCGHNVSVEELEQTRIYWQKDKKMVLTMMSGDMNIWPEYKNRTIFDITNNLSIVILGLRPSDEGTYECVVLKYEKGAFKREHLAEVT

SEQ ID NO: 914 - protein, 101 aa, Artificial Sequence
  CD80 v484 IgV
VIHVTKEVKEVATLSCGHNVSVEELEQTRIYWQKDKKMVLTMMSGDMNIWPEYKNRTIFDITNNLSIMILALRPSDEGTYECVVLKYEKGAFKREHLAEVT

SEQ ID NO: 915 - protein, 101 aa, Artificial Sequence
  CD80 v485 IgV
VIHVTKEVKEVATLSCGHNVSVEELEQTRIYWQKDKKMVLTMMSGDMNIWPEYKNRTIFDITNNLSIMILGLRPSDEGTYECVVLKYEKDAFKREHLAEVT

SEQ ID NO: 916 - protein, 101 aa, Artificial Sequence
  CD80 v486 IgV
VIHVTKEVKEVATLSCGHNVSVEELEQTRIYWQKDKKMVLTMMSGDLNIWPEYKNRTIFDITNNLSIVILALRPSDEGTYECVVLKYEKGAFKREHLAEVT

SEQ ID NO: 917 - protein, 101 aa, Artificial Sequence
  CD80 v487 IgV
VIHVTKEVKEVATLSCGHNVSVEELEQTRIYWQKDKKMVLTMMSGDLNIWPEYKNRTIFDITNNLSIMILALRPSDEGTYECVVLKYEKDAFKREHLAEVT

SEQ ID NO: 918 - protein, 101 aa, Artificial Sequence
  CD80 v488 IgV
VIHVTKEVKEVATLSCGYNVSVEELAQTRIYWQKEKKMVLTMMSGDLNIWPEYKNRTIFDITNNLSIVILGLRPSDEGTYECVVLKYEKGAFKREHLAEVT

SEQ ID NO: 919 - protein, 101 aa, Artificial Sequence
  CD80 v489 IgV
VIHVTKEVKEVATLSCGYNVSVEELAQTRIYWQKEKKMVLTMMSGDLNIWPEYKNRTIFDITNNLSIMILALRPSDEGTYECVVLKYEKGAFKREHLAEVT

SEQ ID NO: 920 - protein, 101 aa, Artificial Sequence
  CD80 v490 IgV
VIHVTKEVKEVATLSCGYNVSVEELAQTRIYWQKEKKMVLTMMSGDLNIWPEYKNRTIFDITNNLSIMILGLRPSDEGTYECVVLKYEKDAFKREHLAEVT

SEQ ID NO: 921 - protein, 101 aa, Artificial Sequence
  CD80 v491 IgV
VIHVTKEVKEVATLSCGYNVSVEELAQTRIYWQKDKKMVLTMMSGDMNIWPEYKNRTIFDITNNLSIVILGLRPSDEGTYECVVLKYEKGAFKREHLAEVT

SEQ ID NO: 922 - protein, 101 aa, Artificial Sequence
  CD80 v492 IgV
VIHVTKEVKEVATLSCGYNVSVEELAQTRIYWQKDKKMVLTMMSGDMNIWPEYKNRTIFDITNNLSIMILALRPSDEGTYECVVLKYEKGAFKREHLAEVT

SEQ ID NO: 923 - protein, 101 aa, Artificial Sequence
  CD80 v493 IgV
VIHVTKEVKEVATLSCGYNVSVEELAQTRIYWQKDKKMVLTMMSGDMNIWPEYKNRTIFDITNNLSIMILGLRPSDEGTYECVVLKYEKDAFKREHLAEVT

SEQ ID NO: 924 - protein, 101 aa, Artificial Sequence
  CD80 v494 IgV
VIHVTKEVKEVATLSCGYNVSVEELAQTRIYWQKDKKMVLTMMSGDLNIWPEYKNRTIFDITNNLSIVILALRPSDEGTYECVVLKYEKGAFKREHLAEVT

SEQ ID NO: 925 - protein, 101 aa, Artificial Sequence
  CD80 v495 IgV
VIHVTKEVKEVATLSCGYNVSVEELAQTRIYWQKDKKMVLTMMSGDLNIWPEYKNRTIFDITNNLSIVILGLRPSDEGTYECVVLKYEKDAFKREHLAEVT

SEQ ID NO: 926 - protein, 101 aa, Artificial Sequence
  CD80 v496 IgV
VIHVTKEVKEVATLSCGYNVSVEELAQTRIYWQKDKKMVLTMMSGDLNIWPEYKNRTIFDITNNLSIMILALRPSDEGTYECVVLKYEKDAFKREHLAEVT

SEQ ID NO: 927 - protein, 101 aa, Artificial Sequence
  CD80 v497 IgV
VIHVTKEVKEVATLSCGYNVSVEELEQTRIYWQKEKKMVLTMMSGDMNIWPEYKNRTIFDITNNLSIMILALRPSDEGTYECVVLKYEKGAFKREHLAEVT

SEQ ID NO: 928 - protein, 101 aa, Artificial Sequence
  CD80 v498 IgV
VIHVTKEVKEVATLSCGYNVSVEELEQTRIYWQKEKKMVLTMMSGDMNIWPEYKNRTIFDITNNLSIMILGLRPSDEGTYECVVLKYEKDAFKREHLAEVT

SEQ ID NO: 929 - protein, 101 aa, Artificial Sequence
  CD80 v499 IgV
VIHVTKEVKEVATLSCGYNVSVEELEQTRIYWQKEKKMVLTMMSGDLNIWPEYKNRTIFDITNNLSIVILALRPSDEGTYECVVLKYEKGAFKREHLAEVT

SEQ ID NO: 930 - protein, 101 aa, Artificial Sequence
  CD80 v500 IgV
VIHVTKEVKEVATLSCGYNVSVEELEQTRIYWQKEKKMVLTMMSGDLNIWPEYKNRTIFDITNNLSIVILGLRPSDEGTYECVVLKYEKDAFKREHLAEVT

SEQ ID NO: 931 - protein, 101 aa, Artificial Sequence
  CD80 v501 IgV
VIHVTKEVKEVATLSCGYNVSVEELEQTRIYWQKEKKMVLTMMSGDLNIWPEYKNRTIFDITNNLSIMILALRPSDEGTYECVVLKYEKDAFKREHLAEVT

SEQ ID NO: 932 - protein, 101 aa, Artificial Sequence
  CD80 v502 IgV
VIHVTKEVKEVATLSCGYNVSVEELEQTRIYWQKDKKMVLTMMSGDMNIWPEYKNRTIFDITNNLSIVILGLRPSDEGTYECVVLKYEKDAFKREHLAEVT

SEQ ID NO: 933 - protein, 101 aa, Artificial Sequence
  CD80 v503 IgV
VIHVTKEVKEVATLSCGYNVSVEELEQTRIYWQKDKKMVLTMMSGDMNIWPEYKNRTIFDITNNLSIMILALRPSDEGTYECVVLKYEKDAFKREHLAEVT

SEQ ID NO: 934 - protein, 107 aa, Artificial Sequence
  CD80 v292 IgV
VIHVTKEVKEVATLSCGHNVSVEELAQTRIYWQKDKKMVLTMMSGDMKIWPEYKNRTIFDITNNLSIVILAVRPSDEGTYECVVLKYEKDAFKREHLAEVTLSVKAD

SEQ ID NO: 935 - protein, 107 aa, Artificial Sequence
  CD80 v293 IgV
VIHVTKEVKEVATLSCGHNVSVEELAQTRIYWQKDKKMVLSMMSGDMTIWPEYKNRTIFDITNNLSIVILALRPSDEGTYECVVLKYEKDAFKREHLAEVTLSVKAD

SEQ ID NO: 936 - protein, 107 aa, Artificial Sequence
  CD80 v294 IgV
VIHVTKEVKEVATLSCGHNVSVEELAQTRIYWQKEKKMVLTMMSGVINIWPEYKNRTIFDITNNLSIVILGLRPSDEGTYECVVLKYEKDAFKREHLAEVTLSVKAD

SEQ ID NO: 937 - protein, 107 aa, Artificial Sequence
  CD80 v295 IgV
VIHVTKEVKEVATLSCGHNVSVEELAQTRIYWQKEKKMVLTMMSGDINIWPEYKNRTIFDITNNLSIVILGLRPSDEGTYECVVLKYEKDAFKREHLAEVTLSVKAD

SEQ ID NO: 938 - protein, 107 aa, Artificial Sequence
  CD80 v296 IgV
VIHVTKEVKEVATLSCGHNVSVEELAQTRIYWQKDKKMVLTMISGDLNIWPEYKNRTIFDITNNLSIVILALRPSDEGTYECVVMKYEKDAFKREHLAEVTLSVKAD

SEQ ID NO: 939 - protein, 107 aa, Artificial Sequence
  CD80 v297 IgV
VIHVTKEVKEVATLSCGHNVSVEELAQTRIYWQKDKKMVLTMISGEMNIWPEYKNRTIFDITNNLSIVILGLRPSDEGTYECVVMKYEKDAFKREHLAEVTLSVKAD

SEQ ID NO: 940 - protein, 107 aa, Artificial Sequence
  CD80 v298 IgV
VIHVTKEVKEVATLSCGYNVSVEELAQTRIYWQKDKKMVLTMMSGDLNIWPEYKNRTIFDITNNLSIVILGLRPSDEGTYECVVLKYEKDSFKREHLAEVTLSVKAD

SEQ ID NO: 941 - protein, 107 aa, Artificial Sequence
  CD80 v299 IgV
VIHVTKEVKEVATLSCGHNVSVEELAQTRIYWQKDKKMVLTMMSGDIKIWPEYKNRTIFDFTNNLSIVILALRPSDEGTYECVVLKYEKDAFKREHLAEVTLSVKAD

SEQ ID NO: 942 - protein, 107 aa, Artificial Sequence
  CD80 v300 IgV
VIHVTKEVKEVATLSCGHNVSVEELAQTRIYWQKDKKMVLTMMSGDVNIWPEYKNRTIFDISNNLSIVILALRPSDEGTYECVVQKYEKDAFKREHLAEVTLSVKAD

SEQ ID NO: 943 - protein, 107 aa, Artificial Sequence
  CD80 v301 IgV
VIHVTKEVKEVATLSCGHNVSVEELAQTRIYWQKEKKMVLTMISGDLNIWPEYKNRTIFDITNNLSIVILGLRPSDEGTYECVVLKYEKDAFKREHLAEVTLSVKAD

SEQ ID NO: 944 - protein, 107 aa, Artificial Sequence
  CD80 v302 IgV
VIHVTKEVKEVATLSCGHNVSVEELAQTRIYWQKDKKMVLTMMSGDVNIWPEYKNRTIFDITNNLSIVILALRPSDEGTYECVVLKYEKDAFKREHLAEVTLSVKAD

SEQ ID NO: 945 - protein, 107 aa, Artificial Sequence
  CD80 v303 IgV
VIHVTKEVKEVATLSCGHNVSVEELAQTRIYWQKDKKMVLTMMSGDLNIWPEYKNRTIFDITNNLSIVILGLRPSDEGTYECVVMKYEKDAFKREHLAEVTLSVKAD

SEQ ID NO: 946 - protein, 107 aa, Artificial Sequence
  CD80 v304 IgV
VIHVTKEVKEVATLSCGHNVSAEELAQTRIYWQKDKKMVLTMMSGDLNIWPEYKNRTIFDITNNLSIVILGLRPSDEGTYECVVLKYEKDAFKREHLAEVTLSVKAD

SEQ ID NO: 947 - protein, 107 aa, Artificial Sequence
  CD80 v305 IgV
VIHVTKEVKEVATLSCGHNVSVEELAQTRIYWQKDKKMVLTMMSGDLNIWPEYKNRTIFDITNNLSIVILGLRPSDEGTYECVVLKYEKDAFKREHLAEVTLSVKAD

SEQ ID NO: 948 - protein, 107 aa, Artificial Sequence
  CD80 v306 IgV
VIHVTKEVKEVATLSCGHNVSVEELAQTRIYWQKDKKMVLTMMSGEINIWPEYKNRTIFDITNNLSIVILALRPSDEGTYECVVLKYEKDAFKREHLAEVTLSVKAD

SEQ ID NO: 949 - protein, 107 aa, Artificial Sequence
  CD80 v307 IgV
VIHVTKEVKEVATLSCGHNVSVEELAHTRIYWQKDKKMVLTMMSGDINIWPEYKNRTIFDITNNLSIVILALRPSDEGTYECVVLKYEKDAFKREHLAEVTLSVKAD

SEQ ID NO: 950 - protein, 107 aa, Artificial Sequence
  CD80 v308 IgV
VIHVTKEVKEVATLSCGHNVSVEELAQTRIYWQKDKKMVLTMMSGEMNIWPEYKNRTIFDITNNLSIVILALRPSDEGTYECVVMKYEKDAFKREHLAEVTLSVKAD

SEQ ID NO: 951 - protein, 107 aa, Artificial Sequence
  CD80 v309 IgV
VIHVTKEVKEVATLSCGHNVSVEELAQTRIYWQKDKKMVLTMMSGEMNIWPEYKNRTIFDITNNLSIVILALRPSDEGTYECVVLKYEKDGFKREHLAEVTLSVKAD

SEQ ID NO: 952 - protein, 107 aa, Artificial Sequence
  CD80 v310 IgV
VIHVTKEVKEVATLSCGHNVSVEELAQTRIYWQKDKKMVLTMMSGEMNIWPEYKNRTIFDITNNLSIVILALRPSDEGTYECVVLKYEKDAFKREHLAEVTLSVKAD

SEQ ID NO: 953 - protein, 107 aa, Artificial Sequence
  CD80 v311 IgV
VIHVTKEVKEVATLSCGHNVSVEELAQTRIYWQKDKKMVLTMMSGDMNIWPEYKNRTIFDITNNLSIVILALRPSDEGTYECVVLKYEKDAFKREHRAEVTLSVKAD

SEQ ID NO: 954 - protein, 107 aa, Artificial Sequence
  CD80 v312 IgV
VIHVTKEVKEVATLSCGYNVSVEELAQTRIYWQKDKKMVLTMMSGDMNIWPEYKNRTIFDITNNLSIVILALRPSDEGTYECVVLKYEKDAFKREHLAEVTLSVKAD

SEQ ID NO: 955 - protein, 107 aa, Artificial Sequence
  CD80 v313 IgV
VIHVTKEVKEVATLSCGHNVSVEELALTRIYWQKDKKMVLTMMSGDVNIWPEYKNRTIFDVTNNLSIVILALRPSDEGTYECVVMKYEKDAFKREHLAEVTLSVKAD

SEQ ID NO: 956 - protein, 107 aa, Artificial Sequence
  CD80 v314 IgV
VIHVTKEVKEVATLSCGHNVSVEELAQTRIYWQKDKKMVLTMMSGDVNIWPEYKNRTIFDVTNNLSIVILALRPSDEGTYECVVMKYEKDAFKREHLAEVTLSVKAD

SEQ ID NO: 957 - protein, 107 aa, Artificial Sequence
  CD80 v315 IgV
VIHVTKEVKEVATLSCGHNVSVEELAQTRIYWQKDKKMVLTMMSGDVNIWPEYKNRTIFDITNNLSIVILALRPSDEGTYECVVMKYEKDAFKQEHLAEVTLSVKAD

SEQ ID NO: 958 - protein, 107 aa, Artificial Sequence
  CD80 v316 IgV
VIHVTKEVKEVATLSCGHNVSVEELAQTRIYWQKDKKMVLTMMSGDVKIWPEYKNRTIFDITNNLSIVILALRPSDEGTYECVVMKYEKDAFKREHLAEVTLSVKAD

SEQ ID NO: 959 - protein, 107 aa, Artificial Sequence
  CD80 v317 IgV
VIHVTKEVKEVATLSCGYNVSVEELAQTRIYWQKDKKMVLTMMSGDVKIWPEYKNRTIFDITNNLSIVILALRPSDEGTYECVVLKYEKDAFKREHLAEVTLSVKAD

SEQ ID NO: 960 - protein, 107 aa, Artificial Sequence
  CD80 v318 IgV
VIHVTKEVKEVATLSCGHNVSVEELERTRIYWQKDKKMVLTMMSGDLYIWPEYKNRTIFDITNNLSIVILALRPSDEGTYECVVQKYEKDAFKREHLAEVTLSVKAD

SEQ ID NO: 961 - protein, 107 aa, Artificial Sequence
  CD80 v319 IgV
VIHVTKEVKEVATLSCGHNVSVEELAQTRIYWQKDKKMVLTMMSGELNIWPEYKNRTIFDITNNLSIMILALRPSDEGTYECVVQKYEKDALKREHLAEVTLSVKAD

SEQ ID NO: 962 - protein, 107 aa, Artificial Sequence
  CD80 v320 IgV
VIHVTKEVKEVATLSCGHNVSVEELAQTRIYWQKDKKMVLTMMSGDINIWPEYKNRTIFDISNNLSIVILALRPSDEGTYECVVQKYDKDAFKREHLAEVTLSVKAD

SEQ ID NO: 963 - protein, 107 aa, Artificial Sequence
  CD80 v321 IgV
VIHVTKEVKEVATLSCGHNVSVEDLARTRIYWQKDKKMVLSMMSGDVNIWPEYKNRTIFDITNNLSIVILALRPSDEGTYECVVQKYEKDAFKREHLAEVTLSVKAD

SEQ ID NO: 964 - protein, 107 aa, Artificial Sequence
  CD80 v322 IgV
VIHVTKEVKEVATLTCGYNVSVEELAQTRIYWQKDKKMVLTMMSGDVNIWPEYKNRTIFDIANSLSIVILGLRPSDEGTYECVVQKYEKNAFKREHLAEVTLSVKAD

SEQ ID NO: 965 - protein, 107 aa, Artificial Sequence
  CD80 v323 IgV
VIHVTKEVKEVATLSCGHNVSVEELAQTRIYWQKDKKMVLTMMSGDLNIWPEYKNRTIFDITNNLSIMILGLRPSDEGTYECVVQKYEKGAFKREHLAEVTLSVKAD

SEQ ID NO: 966 - protein, 107 aa, Artificial Sequence
  CD80 v324 IgV
VIHVTKEVKEVATLSCGYNVSVEELAQTRIYWQKDKKMVLTMMSGDINIWPEYKNRTIFDITNNLSIMILGLRPSDEGTYECVVLKYEKDAFKLEHLAEVTLSVKAD

SEQ ID NO: 967 - protein, 18 aa, Artificial Sequence
  CD80 v325 IgV
VIHVTKEVKEVTLSVKAD

SEQ ID NO: 968 - protein, 107 aa, Artificial Sequence
  CD80 v326 IgV
VIHVTKEVKEVATLSCGHNVSVEELAQTRIYWRKEKKMVLTMMSGDVNIWPEYKNRTIFDINNNLSIVILGLRPSDEGTYECVVLKYEKDAFKREHLAEVTLSVKAD

SEQ ID NO: 969 - protein, 107 aa, Artificial Sequence
  CD80 v327 IgV
VIHVTKEVKEVATLSCGYNVSAEELAQTRIYWQKDKKMVLSMMSGDVNIWPEYKNRTIFDINNNLSIVILGLRPSDEGTYECVVLKYEKDGFKREHLAEVTLSVKAD

SEQ ID NO: 970 - protein, 107 aa, Artificial Sequence
  CD80 v328 IgV
VIHVTKEVKEVATLSCGHNVSVEELAQTRIYWQKDKKMVLTMMSGDLNIWPEYKNRTIFDITNNLSIVIMALRPSDEGTYECVVLKYEKDAFKREHLAEVTLSVKAD

SEQ ID NO: 971 - protein, 107 aa, Artificial Sequence
  CD80 v329 IgV
VIHVTKEVKEVATLSCGHNVSVEELAQTRIYWQKDKKMVLTMMSGDLNIWPEYKNRTIFDITNNLSIMILALRPSDEGTYECVVLKYEKDAFKREHLAEVTLSVKAD

SEQ ID NO: 972 - protein, 107 aa, Artificial Sequence
  CD80 v330 IgV
VIHVTKEVKEVATLSCGHNVSVEELAQTRIYWQKDKKMVLTMMSGVLNIWPEYKNRTIFDITNNLSIMILALRPSDEGTYECVVLKYDKDAFKREHLAEVTLSVKAD

SEQ ID NO: 973 - protein, 107 aa, Artificial Sequence
  CD80 v331 IgV
VIHVTKEVKEVATLSCGHNVSVEELAQTRIYWQKDKKMVLTMMSGVLNIWPEYKNRTIFDITNNLSIMILALRPSDEGTYECVVLKYEKGAFKREHLAEVTLSVKAD

SEQ ID NO: 974 - protein, 107 aa, Artificial Sequence
  CD80 v332 IgV
VIHVTKEVKEVATLSCGHNVSVEELAQTRIYWQKDKKMVLTMMSGVLNIWPEYKNRTIFDITNNLSIMILALRPSDEGTYECVVLKYENDAFKREHLAEVTLSVKAD

SEQ ID NO: 975 - protein, 107 aa, Artificial Sequence
  CD80 v333 IgV
VIHVTKEVKEVATLSCGHNVSVEELAQTRIYWQKDKKMVLTMMSGVLNIWPEYKNRTIFDITNNLSIMILALRPSDEGTYECVVQKYEKDAFKREHLAEVTLSVKAD

SEQ ID NO: 976 - protein, 107 aa, Artificial Sequence
  CD80 v334 IgV
VIHVTKEVKEVATLSCGHNVSVEELAQTRIYWQKDKKMVLTMMSGVLNIWPEYKNRTIFDITNNLSIMILALRPSDEGTYECVVLKYEKDAFKREHLAEVTLSVKAD

SEQ ID NO: 977 - protein, 107 aa, Artificial Sequence
  CD80 v335 IgV
VIHVTKEVKEVATLSCGHNVSVEELAQTRIYWQKDKKMVLTMMSGVLNIWPEYKNRTIFDITNNLSIVIMALRPSDEGTYECVVLKYEKDAFKREHLAEVTLSVKAD

SEQ ID NO: 978 - protein, 107 aa, Artificial Sequence
  CD80 v336 IgV
VIHVTKEVKEVATLSCGHNVSVEELAQTRIYWQKDKKMVLTMMSGVLNIWPEYKNRTIFDITNNLSIVIMALRPSDEGTYECVVQKYEKDAFKREHLAEVTLSVKAD

SEQ ID NO: 979 - protein, 107 aa, Artificial Sequence
  CD80 v337 IgV
VIHVTKEVKEVATLSCGHNVSVEELAQTRIYWQKDKKMVLTMMSGDVKIWPEYKNRTIFDITNNLSIMILALRPSDEGTYECVVLKYEKDAFKREHLAEVTLSVKAD

SEQ ID NO: 980 - protein, 107 aa, Artificial Sequence
  CD80 v338 IgV
VIHVTKEVKEVATLSCGHNVSVEDLAQTRIYWQKDKKMVLTMMSGDLNIWPEYKNRTIFDITNNLSIMILALRPSDEGTYECVVLKYEKDAFKRVHQAEVTLSVKAD

SEQ ID NO: 981 - protein, 107 aa, Artificial Sequence
  CD80 v339 IgV
VIHVTKEVKEVATLSCGHNVSVEELAQTRIYWQKDKKMVLTMMSGEINIWPEYKNRTIFDIANNLSIMILALRPSDEGTYECVVMKCEKDAFKREHLAEVTLSVKAD

SEQ ID NO: 982 - protein, 107 aa, Artificial Sequence
  CD80 v340 IgV
VIHVTKEVKEVATLSCGHNVSVEELAQTRIYWQKDKKMVLTMMSGEINIWPEYKNRTIFDITNNLSIMILALRPSDEGTYECVVMKYEKDAFKREHLAEVTLSVKAD

SEQ ID NO: 983 - protein, 107 aa, Artificial Sequence
  CD80 v341 IgV
VIHVTKEVKEVATLSCGHNVSVEELAQTRIYWQKDKKMVLTMMSGELNIWPEYKNRTIFDITNNLSIMILGLRPSDEGTYECVVLKCEKDAFRREHLAEVTLSVKAD

SEQ ID NO: 984 - protein, 107 aa, Artificial Sequence
  CD80 v342 IgV
VIHVTKEVKEVATLSCGHNVSVEELAQTRIYWQKDKKMVLTMMSGELNIWPEYKNRTIFDITNNLSIMILALRPSDEGMYECVVMKYEKDAFKREHLAEVTLSVKAD

SEQ ID NO: 985 - protein, 107 aa, Artificial Sequence
  CD80 v343 IgV
VIHVTKEVKEVATLSCGHNVSVEELAQTRIYWQKDKKMVLTMMSGELNIWPEYKNRTIFDITNNLSIMILALRPSDEGMYECVVMKYEKDAFKREHQAEVTLSVKAD

SEQ ID NO: 986 - protein, 107 aa, Artificial Sequence
  CD80 v344 IgV
VIHVTKEVKEVATLSCGHNVSVEELAQTRIYWQKDKKMVLTMMSGEVNIWPEYKNRTIFDITNNLSIMILALRPSDEGTYECVVQKYEKDAFKREHLAEVTLSVKAD

SEQ ID NO: 987 - protein, 107 aa, Artificial Sequence
  CD80 v345 IgV
VIHVTKEVKEVATLSCGHNVSVEELAQTRIYWQKDKKMVLTMISGDLNIWPEYKNRTIFDITNNLSIMILALRPSDEGTYECVVLKYEKDAFKREHLAEVTLSVKAD

SEQ ID NO: 988 - protein, 107 aa, Artificial Sequence
  CD80 v346 IgV
VIHVTKEVKEVATLSCGHNVSVEELAQTRIYWQKDKKMVLTMMSGDINIWPEYKNRTIFDITNNLSIMILALRPSDEGTYECVVLKNEKDAFKREHLAEVTLSVKAD

SEQ ID NO: 989 - protein, 107 aa, Artificial Sequence
  CD80 v347 IgV
VIHVTKEVKEVATLSCGHNVSVEELAQTRIYWQKDKKMVLTMMSGDLNIWPEYKNRTIFDITNNLSIMILALRPSDEGTYECVVLKYEKDAFKRVHQAEVTLSVKAD

SEQ ID NO: 990 - protein, 107 aa, Artificial Sequence
  CD80 v348 IgV
VIHVTKEVKEVATLSCGHNVSVEELAQTRIYWQKDKKMVLTMMSGDLNIWPEFKNRTIFDITNNLSIMILGLRPSDEGTYECVVLKYEKDAFRRVHLAEVTLSVKAD

SEQ ID NO: 991 - protein, 107 aa, Artificial Sequence
  CD80 v349 IgV
VIHVTKEVKEVATLSCGHNVSVEELAQTRIYWQKDKKMVLTMMSGDVKIWPEYKNRTIFDITNNLSIMILGLRPSDEGTYECVVMKYEKDAFKREHLAEVTLSVKAD

SEQ ID NO: 992 - protein, 107 aa, Artificial Sequence
  CD80 v350 IgV
VIHVTKEVKEVATLSCGHNVSVEELAQTRIYWQKDKKMVLTMMSGDVKIWPEYKNRTIFDITNNLSIMILALRPSDEGTYECVVMKYEKDAFKREHLAEVTLSVKAD

SEQ ID NO: 993 - protein, 107 aa, Artificial Sequence
  CD80 v351 IgV
VIHVTKEVKEVATLSCGHNVSVEELAQTRIYWQKDKKMVLTMMSGDVNIWPEYKNRTIFDITNNLSIMILALRPSDEGTYECVVMKYEKDAFKREHLAEVTLSVKAD

SEQ ID NO: 994 - protein, 107 aa, Artificial Sequence
  CD80 v352 IgV
VIHVTKEVKEVATLSCGHNVSVEELAQTRIYWQKDKKMVLTMMSGDVNIWPEYKNRTIFDITNNLSIMILALRPSDEGTYECVVMKDEKDAFKREHLAEVTLSVKAD

SEQ ID NO: 995 - protein, 107 aa, Artificial Sequence
  CD80 v353 IgV
VIHVTKEVKEVATLSCGHNVSVEELAQTRIYWQKDKKMVLSMMSGEINIWPEYKNRTIFDITNNLSIMILALRPSDEGTYECVVLKYEKDAFRRVHLAEVTLSVKAD

SEQ ID NO: 996 - protein, 107 aa, Artificial Sequence
  CD80 v354 IgV
VIHVTKEVKEVATLSCGYNVSVEELAQTRIYWQKDKKMVLTMMSGEINIWPEYKNRTIFDITNNLSIMILALRPSDEGTYECVVLKYEKDAFKLEHLAEVTLSVKAD

SEQ ID NO: 997 - protein, 107 aa, Artificial Sequence
  CD80 v355 IgV
VIHVTKEVKEVATLSCGYNVSVEELAQTRIYWQKDKKIVLTMMSGDLNIWPEYKNRTIFDITNNLSIMILALRPSDEGTYECVVMKYEKDAFKREHLAEVTLSVKAD

SEQ ID NO: 998 - protein, 107 aa, Artificial Sequence
  CD80 v356 IgV
VIHVTKEVKEVATLSCGYNVSVEELAQTRIYWQKDKKMVLTMMSGDINIWPEYKNRTIFDITNNLSIMILALRPSDEGTYECVVLKNEKDAFKREHLAEVTLSVKAD

SEQ ID NO: 999 - protein, 107 aa, Artificial Sequence
  CD80 v357 IgV
VIHVTKEVKEVATLSCGYNVSVEELAQTRIYWQKDKKMVLTMMSGDLNIWPEYKNRTIFDITNNLSIMILGLRPSDEGTYECVVMKYEKDAFKREHLAEVTLSVKAD

SEQ ID NO: 1000 - protein, 107 aa, Artificial Sequence
  CD80 v358 IgV
VIHVTKEVKEVATLSCGYNVSVEELAQTRIYWQKDKKMVLTMMSGDLNIWPEYKNRTIFDITNNLSIMILALRPSDEGTYECVVLKYEKDAFKRVHQAEVTLSVKAD

SEQ ID NO: 1001 - protein, 107 aa, Artificial Sequence
  CD80 v359 IgV
VIHVTKEVKEVATLSCGYNVSVEELAQTRIYWQKDKKMVLTMMSGDLNIWPEFKNRTIFDITNNLSIMILGLRPSDEGTYECVVLKYEKDAFKREHLAEVTLSVKAD

SEQ ID NO: 1002 - protein, 107 aa, Artificial Sequence
  CD80 v360 IgV
VIHVTKEVKEVATLSCGYNVSVEELAQTRIYWQKDKKMVLTMMSGDLNIWPEFKNRTIFDITNNLSIMILGLRPSDEGTYECVVLKYEKDAFRRVHLAEVTLSVKAD

SEQ ID NO: 1003 - protein, 107 aa, Artificial Sequence
  CD80 v361 IgV
VIHVTKEVKEVATLSCGYNVSVEELAQTRIYWQKDKKMVLTMMSGDVNIWPEYKNRTIFDITNNLSIMILALRPSDEGTYECVVMKYEKDAFKREHLAEVTLSVKAD

SEQ ID NO: 1004 - protein, 107 aa, Artificial Sequence
  CD80 v362 IgV
VIHVTKEVKEVATLSCGYNVSVEELAQTRIYWQKDKKMVLTMMSGDMNIWPEYKNRTIFDITNNLSIMILGLRPSDEGTYECVVLKYEKDAFKQVHLAEVTLSVKAD

SEQ ID NO: 1005 - protein, 107 aa, Artificial Sequence
  CD80 v363 IgV
VIHVTKEVKEVATLSCGYNVSVEELAQTRIYWQKDKKMVLTMMSGDMNIWPEYKNRTIFDITNNLSIMILALRPSDEGTYECVVMKYEKDAFKQEHLAEVTLSVKAD

SEQ ID NO: 1006 - protein, 107 aa, Artificial Sequence
  CD80 v364 IgV
VIHVTKEVKEVATLSCGYNVSVEELAQTRIYWQKDKKMVLTMMSGDMNIWPEYKNRTIFDITNNLSIMILALRPSDEGMYECVVMKYEKDAFKREHLAEVTLSVKAD

SEQ ID NO: 1007 - protein, 107 aa, Artificial Sequence
  CD80 v365 IgV
VIHVTKEVKEVATLSCGYNVSDEELAQTRIYWQKDKKMVLTMMSGDVKIWPEYKNRTIFDITNNLSIMILALRPSDEGTYECVVLKYEKDAFKREHLAEVTLSVKAD

SEQ ID NO: 1008 - protein, 107 aa, Artificial Sequence
  CD80 v366 IgV
VIHVTKEVKEVATLSCGHNVSVEELALTRIYWLKDKKMVLSMMSGDVKIWPEYKNRTIFDITNNLSIMILALRPSDEGTYECVVMKYEKDAFKREHLAEVTLSVKAD

SEQ ID NO: 1009 - protein, 107 aa, Artificial Sequence
  CD80 v367 IgV
VIHVTKEVKEVATLSCGHNVSVEELAQTRIYWLKDKKMVLTMMSGDVNIWPEYKNRTIFDISNNLSIMILALRPSDEGTYECVVMKYEKDAFKREHLAEVTLSVKAD

SEQ ID NO: 1010 - protein, 107 aa, Artificial Sequence
  CD80 v368 IgV
VIHVTKEVKEVATLSCGHNVSVEELAQTRIYWRKDKKIVLTMMSGDLNIWPEYKNRTIFDITNNLSIMILALRPSDEGTYECVVLKYEKDAFKREHLAEVTLSVKAD

SEQ ID NO: 1011 - protein, 107 aa, Artificial Sequence
  CD80 v369 IgV
VIHVTKEVKEVATLSCGHNVSVEELAQTCIYWQKDKKMVLTMMSGDLNIWPEYKNRTIFDITNNLSIMILGLRPSDEGTYECVVMKYEKDAFKREHLAEVTLSVKAD

SEQ ID NO: 1012 - protein, 107 aa, Artificial Sequence
  CD80 v370 IgV
VIHVTKEVKEVATLSCGHNVPVEELAQTRIYWQKDKEMVLTMMSGEINIWPEYKNRTIFDITNNLSIMILALRPSDEGTYECVVLKYEKDAFKREHLAEVTLSVKAD

SEQ ID NO: 1013 - protein, 107 aa, Artificial Sequence
  CD80 v371 IgV
VIHVTKEVKEVATLSCGHNVPVEELAQTRIYWQKDKEMVLTMMSGEINIWPEYKNRTIFDITNNLSIMILALRPSDEGTYECVVLKYEKDAFKLEHLAEVTLSVKAD

SEQ ID NO: 1014 - protein, 107 aa, Artificial Sequence
  CD80 v372 IgV
VIHVTKEVKEVARLSCGHNVSVEELAQTRIYWQKDKKMVLTMMSGDLNIWPEYKNRTIFDITNNLSIMILALRPSDEGTYECVVLKYEKDAFKREHLAEVTLSVKAD

SEQ ID NO: 1015 - protein, 107 aa, Artificial Sequence
  CD80 v373 IgV
VIHVTKEVKEVARLSCGYNVSVEELAQTRIYWQKDKKMVLTMMSGDMNIWPEYKNRTIFDITNNLSIMILALRPSDEGTYECVVMKYEKDAFKQEHLAEVTLSVKAD

SEQ ID NO: 1016 - protein, 107 aa, Artificial Sequence
  CD80 v374 IgV
VIHVTKEVKEVARLSCGHNVSVEELALTRIYWLKDKKMVLSMMSGDVKIWPEYKNRTIFDITNNLSIMILALRPSDEGTYECVVMKYEKDAFKREHLAEVTLSVKAD

SEQ ID NO: 1017 - protein, 107 aa, Artificial Sequence
  CD80 v375 IgV
VIHVTKEVKEVARLSCGHNVSVEELAQTRIYWLKDKKMVLTMMSGDLNIWPEYKNRTIFDITNNLSIMILALRPSDEGTYECVVMKYEKDAFKREHLAEVTLSVKAD

SEQ ID NO: 1018 - protein, 107 aa, Artificial Sequence
  CD80 v376 IgV
VIHVTKEVKEVARLSCGHNVSVEELAQTRIYWLKDKKMVLTMMSGDVNIWPEYKNRTIFDISNNLSIMILALRPSDEGTYECVVMKYEKDAFKREHLAEVTLSVKAD

SEQ ID NO: 1019 - protein, 107 aa, Artificial Sequence
  CD80 v377 IgV
VIHVTKEVKEVARLSCGHNVSVEELAQTRIYWRKDKKIVLTMMSGDLNIWPEYKNRTIFDITNNLSIMILALRPSDEGTYECVVLKYEKDAFKREHLAEVTLSVKAD

SEQ ID NO: 1020 - protein, 107 aa, Artificial Sequence
  CD80 v378 IgV
VIHVTKEVKEVARLSCGHNVSVEELAQTRIYWRKDKKIVLTMMSGDLNIWPEYKNRTIFDITNNLSIMILALRPSDEGTYECVVLKYEKDAFKRVHQAEVTLSVKAD

SEQ ID NO: 1021 - protein, 107 aa, Artificial Sequence
  CD80 v379 IgV
VIHVTKEVKEVARLSCGHNVSVEELAQTRIYWRKDKKIVLTMMSGDLNIWPEYKNRTIFDITNNLSIMILALRPSDEGTYECVVMKYEKDAFKREHLAEVTLSVKAD

SEQ ID NO: 1022 - protein, 107 aa, Artificial Sequence
  CD80 v380 IgV
VIHVTKEVKEVARLSCGHNVSVEELAQTRIYWRKDKKIVLTMMSGDLNIWPEYKNRTIFDITNNLSIMILALRPSDEGTYECVVMKYEKDAFKQEHLAEVTLSVKAD

SEQ ID NO: 1023 - protein, 107 aa, Artificial Sequence
  CD80 v381 IgV
VIHVTKEVKEVARLSCGHNVSVEELAQTRIYWRKDKKMVLTMMSGDLNIWPEYKNRTIFDITNNLSIMILALRPSDEGTYECVVLKYEKDAFKREHLAEVTLSVKAD

SEQ ID NO: 1024 - protein, 107 aa, Artificial Sequence
  CD80 v382 IgV
VIHVTKEVKEVARLSCGHNVSVEELAQTRIYWRKDKKMVLTMMSGDLNIWPEYKNRTIFDITNNLSIMILALRPSDEGTYECVVMKYEKDAFKREHLAEVTLSVKAD

SEQ ID NO: 1025 - protein, 107 aa, Artificial Sequence
  CD80 v383 IgV
VIHVTKEVKEVATLSCGHNVSDEDLAQTRIYWQKDKKMVLTMMSGDLNIWPEYKNRTIFDITNNLSIMILALRPSDEGTYECVVLKYEKDAFKREHLAEVTLSVKAD

SEQ ID NO: 1026 - protein, 107 aa, Artificial Sequence
  CD80 v384 IgV
VIHVTKEVKEVATLSCGHNVSDEDLAQTRIYWQKDKKMVLTMMSGDLNIWPEYKNRTIFDITNNLSIMILALRPSDEGTYECVVMKYEKGAFKREHLAEVTLSVKAD

SEQ ID NO: 1027 - protein, 107 aa, Artificial Sequence
  CD80 v385 IgV
VIHVTKEVKEVATLSCGHNVSDEDLAQTRIYWQKDKKMVLTMMSGDVNIWPEYKNRTIFDITNNLSIMILALRPSDEGTYECVVLKYEKDAFKREHLAEVTLSVKAD

SEQ ID NO: 1028 - protein, 107 aa, Artificial Sequence
  CD80 v386 IgV
VIHVTKEVKEVATLSCGHNVSVEELAQTRIYWQKEKKMVLTMMSGVMNIWPEYKNRTIFDITNNLSIVILALRPSDEGTYECVVLKYEKDAFKREHLAEVTLSVKAD

SEQ ID NO: 1029 - protein, 107 aa, Artificial Sequence
  CD80 v387 IgV
VIHVTKEVKEVATLSCGHNVSVEELAQTRIYWQKEKKMVLTMMSGDLNIWPEYKNRTIFDITNNLSIVILALRPSDEGTYECVVLKYEKDAFKREHLAEVTLSVKAD

SEQ ID NO: 1030 - protein, 107 aa, Artificial Sequence
  CD80 v388 IgV
VIHVTKEVKEVATLSCGHNVSVEELAQTRIYWQKEKKMVLTMMSGDMNIWPEYKNRTIFDITNNLSIMILALRPSDEGTYECVVLKYEKDAFKREHLAEVTLSVKAD

SEQ ID NO: 1031 - protein, 107 aa, Artificial Sequence
  CD80 v389 IgV
VIHVTKEVKEVATLSCGHNVSVEELAQTRIYWQKEKKMVLTMMSGDMNIWPEYKNRTIFDITNNLSIVILALRPSDEGTYECVVQKYEKDAFKREHLAEVTLSVKAD

SEQ ID NO: 1032 - protein, 107 aa, Artificial Sequence
  CD80 v390 IgV
VIHVTKEVKEVATLSCGHNVSVEELAQTRIYWQKDKKMVLTMMSGVMNIWPEYKNRTIFDITNNLSIVILALRPSDEGTYECVVLKYEKDAFKREHLAEVTLSVKAD

SEQ ID NO: 1033 - protein, 107 aa, Artificial Sequence
  CD80 v392 IgV
VIHVTKEVKEVATLSCGHNVSVEELAQTRIYWQKDKKMVLTMMSGDMNIWPEYKNRTIFDITNNLSIMILALRPSDEGTYECVVLKYEKDAFKREHLAEVTLSVKAD

SEQ ID NO: 1034 - protein, 107 aa, Artificial Sequence
  CD80 v393 IgV
VIHVTKEVKEVATLSCGHNVSVEELAQTRIYWQKDKKMVLTMMSGDMNIWPEYKNRTIFDITNNLSIVILALRPSDEGTYECVVQKYEKDAFKREHLAEVTLSVKAD

SEQ ID NO: 1035 - protein, 107 aa, Artificial Sequence
  CD80 v394 IgV
VIHVTKEVKEVATLSCGHNVSVEELAQTRIYWQKEKKMVLTMMSGVLNIWPEYKNRTIFDITNNLSIVILALRPSDEGTYECVVLKYEKDAFKREHLAEVTLSVKAD

SEQ ID NO: 1036 - protein, 107 aa, Artificial Sequence
  CD80 v395 IgV
VIHVTKEVKEVATLSCGHNVSVEELAQTRIYWQKEKKMVLTMMSGVMNIWPEYKNRTIFDITNNLSIMILALRPSDEGTYECVVLKYEKDAFKREHLAEVTLSVKAD

SEQ ID NO: 1037 - protein, 107 aa, Artificial Sequence
  CD80 v396 IgV
VIHVTKEVKEVATLSCGHNVSVEELAQTRIYWQKEKKMVLTMMSGVMNIWPEYKNRTIFDITNNLSIVILALRPSDEGTYECVVQKYEKDAFKREHLAEVTLSVKAD

SEQ ID NO: 1038 - protein, 107 aa, Artificial Sequence
  CD80 v397 IgV
VIHVTKEVKEVATLSCGHNVSVEELAQTRIYWQKEKKMVLTMMSGDLNIWPEYKNRTIFDITNNLSIMILALRPSDEGTYECVVLKYEKDAFKREHLAEVTLSVKAD

SEQ ID NO: 1039 - protein, 107 aa, Artificial Sequence
  CD80 v398 IgV
VIHVTKEVKEVATLSCGHNVSVEELAQTRIYWQKEKKMVLTMMSGDLNIWPEYKNRTIFDITNNLSIVILALRPSDEGTYECVVQKYEKDAFKREHLAEVTLSVKAD

SEQ ID NO: 1040 - protein, 107 aa, Artificial Sequence
  CD80 v399 IgV
VIHVTKEVKEVATLSCGHNVSVEELAQTRIYWQKEKKMVLTMMSGDMNIWPEYKNRTIFDITNNLSIMILALRPSDEGTYECVVQKYEKDAFKREHLAEVTLSVKAD

SEQ ID NO: 1041 - protein, 107 aa, Artificial Sequence
  CD80 v400 IgV
VIHVTKEVKEVATLSCGHNVSVEELAQTRIYWQKDKKMVLTMMSGVLNIWPEYKNRTIFDITNNLSIVILALRPSDEGTYECVVLKYEKDAFKREHLAEVTLSVKAD

SEQ ID NO: 1042 - protein, 107 aa, Artificial Sequence
  CD80 v401 IgV
VIHVTKEVKEVATLSCGHNVSVEELAQTRIYWQKDKKMVLTMMSGVMNIWPEYKNRTIFDITNNLSIMILALRPSDEGTYECVVLKYEKDAFKREHLAEVTLSVKAD

SEQ ID NO: 1043 - protein, 107 aa, Artificial Sequence; identical to SEQ ID NO: 203
  CD80 v402 IgV

SEQ ID NO: 1044 - protein, 107 aa, Artificial Sequence
  CD80 v403 IgV
VIHVTKEVKEVATLSCGHNVSVEELAQTRIYWQKDKKMVLTMMSGDMNIWPEYKNRTIFDITNNLSIMILALRPSDEGTYECVVQKYEKDAFKREHLAEVTLSVKAD

SEQ ID NO: 1045 - protein, 107 aa, Artificial Sequence
  CD80 v404 IgV
VIHVTKEVKEVATLSCGHNVSVEELAQTRIYWQKEKKMVLTMMSGVLNIWPEYKNRTIFDITNNLSIMILALRPSDEGTYECVVLKYEKDAFKREHLAEVTLSVKAD

SEQ ID NO: 1046 - protein, 107 aa, Artificial Sequence
  CD80 v405 IgV
VIHVTKEVKEVATLSCGHNVSVEELAQTRIYWQKEKKMVLTMMSGVLNIWPEYKNRTIFDITNNLSIVILALRPSDEGTYECVVQKYEKDAFKREHLAEVTLSVKAD

SEQ ID NO: 1047 - protein, 107 aa, Artificial Sequence
  CD80 v406 IgV
VIHVTKEVKEVATLSCGHNVSVEELAQTRIYWQKEKKMVLTMMSGVMNIWPEYKNRTIFDITNNLSIMILALRPSDEGTYECVVQKYEKDAFKREHLAEVTLSVKAD

SEQ ID NO: 1048 - protein, 107 aa, Artificial Sequence
  CD80 v407 IgV
VIHVTKEVKEVATLSCGHNVSVEELAQTRIYWQKEKKMVLTMMSGDLNIWPEYKNRTIFDITNNLSIMILALRPSDEGTYECVVQKYEKDAFKREHLAEVTLSVKAD

SEQ ID NO: 1049 - protein, 107 aa, Artificial Sequence
  CD80 v408 IgV
VIHVTKEVKEVATLSCGHNVSVEELAQTRIYWQKDKKMVLTMMSGVLNIWPEYKNRTIFDITNNLSIVILALRPSDEGTYECVVQKYEKDAFKREHLAEVTLSVKAD

SEQ ID NO: 1050 - protein, 107 aa, Artificial Sequence
  CD80 v409 IgV
VIHVTKEVKEVATLSCGHNVSVEELAQTRIYWQKDKKMVLTMMSGVMNIWPEYKNRTIFDITNNLSIMILALRPSDEGTYECVVQKYEKDAFKREHLAEVTLSVKAD

SEQ ID NO: 1051 - protein, 107 aa, Artificial Sequence
  CD80 v410 IgV
VIHVTKEVKEVATLSCGHNVSVEELAQTRIYWQKDKKMVLTMMSGDLNIWPEYKNRTIFDITNNLSIMILALRPSDEGTYECVVQKYEKDAFKREHLAEVTLSVKAD

SEQ ID NO: 1052 - protein, 107 aa, Artificial Sequence
  CD80 v411 IgV
VIHVTKEVKEVATLSCGHNVSVEELAQTRIYWQKEKKMVLTMMSGVLNIWPEYKNRTIFDITNNLSIMILALRPSDEGTYECVVQKYEKDAFKREHLAEVTLSVKAD

SEQ ID NO: 1053 - protein, 107 aa, Artificial Sequence
  CD80 v412 IgV
VIHVTKEVKEVATLSCGHNVSVEELAQTRIYWQKEKKMVLTMMSGDVNIWPEYKNRTIFDITNNLSIVILALRPSDEGTYECVVLKYEKDAFKREHLAEVTLSVKAD

SEQ ID NO: 1054 - protein, 107 aa, Artificial Sequence
  CD80 v413 IgV
VIHVTKEVKEVATLSCGHNVSVEELAQTRIYWQKEKKMVLTMMSGDMKIWPEYKNRTIFDITNNLSIVILALRPSDEGTYECVVLKYEKDAFKREHLAEVTLSVKAD

SEQ ID NO: 1055 - protein, 107 aa, Artificial Sequence
  CD80 v414 IgV
VIHVTKEVKEVATLSCGHNVSVEELAQTRIYWQKEKKMVLTMMSGDMNIWPEYKNRTIFDITNNLSIVILALRPSDEGTYECVVLKYENDAFKREHLAEVTLSVKAD

SEQ ID NO: 1056 - protein, 107 aa, Artificial Sequence
  CD80 v415 IgV
VIHVTKEVKEVATLSCGHNVSVEELAQTRIYWQKDKKMVLTMMSGDMKIWPEYKNRTIFDITNNLSIVILALRPSDEGTYECVVLKYEKDAFKREHLAEVTLSVKAD

SEQ ID NO: 1057 - protein, 107 aa, Artificial Sequence
  CD80 v416 IgV
VIHVTKEVKEVATLSCGHNVSVEELAQTRIYWQKDKKMVLTMMSGDMNIWPEYKNRTIFDITNNLSIVILALRPSDEGTYECVVLKYENDAFKREHLAEVTLSVKAD

SEQ ID NO: 1058 - protein, 107 aa, Artificial Sequence
  CD80 v417 IgV
VIHVTKEVKEVATLSCGHNVSVEELAQTRIYWQKEKKMVLTMMSGDVKIWPEYKNRTIFDITNNLSIVILALRPSDEGTYECVVLKYEKDAFKREHLAEVTLSVKAD

SEQ ID NO: 1059 - protein, 107 aa, Artificial Sequence
  CD80 v418 IgV
VIHVTKEVKEVATLSCGHNVSVEELAQTRIYWQKEKKMVLTMMSGDVNIWPEYKNRTIFDITNNLSIMILALRPSDEGTYECVVLKYEKDAFKREHLAEVTLSVKAD

SEQ ID NO: 1060 - protein, 107 aa, Artificial Sequence
  CD80 v419 IgV
VIHVTKEVKEVATLSCGHNVSVEELAQTRIYWQKEKKMVLTMMSGDVNIWPEYKNRTIFDITNNLSIVILALRPSDEGTYECVVLKYENDAFKREHLAEVTLSVKAD

SEQ ID NO: 1061 - protein, 107 aa, Artificial Sequence
  CD80 v420 IgV
VIHVTKEVKEVATLSCGHNVSVEELAQTRIYWQKEKKMVLTMMSGDMKIWPEYKNRTIFDITNNLSIMILALRPSDEGTYECVVLKYEKDAFKREHLAEVTLSVKAD

SEQ ID NO: 1062 - protein, 107 aa, Artificial Sequence
  CD80 v421 IgV
VIHVTKEVKEVATLSCGHNVSVEELAQTRIYWQKEKKMVLTMMSGDMKIWPEYKNRTIFDITNNLSIVILALRPSDEGTYECVVLKYENDAFKREHLAEVTLSVKAD

SEQ ID NO: 1063 - protein, 107 aa, Artificial Sequence
  CD80 v422 IgV
VIHVTKEVKEVATLSCGHNVSVEELAQTRIYWQKEKKMVLTMMSGDMNIWPEYKNRTIFDITNNLSIMILALRPSDEGTYECVVLKYENDAFKREHLAEVTLSVKAD

SEQ ID NO: 1064 - protein, 107 aa, Artificial Sequence
  CD80 v423 IgV
VIHVTKEVKEVATLSCGHNVSVEELAQTRIYWQKDKKMVLTMMSGDVKIWPEYKNRTIFDITNNLSIVILALRPSDEGTYECVVLKYEKDAFKREHLAEVTLSVKAD

SEQ ID NO: 1065 - protein, 107 aa, Artificial Sequence
  CD80 v424 IgV
VIHVTKEVKEVATLSCGHNVSVEELAQTRIYWQKDKKMVLTMMSGDVNIWPEYKNRTIFDITNNLSIMILALRPSDEGTYECVVLKYEKDAFKREHLAEVTLSVKAD

SEQ ID NO: 1066 - protein, 107 aa, Artificial Sequence
  CD80 v425 IgV
VIHVTKEVKEVATLSCGHNVSVEELAQTRIYWQKDKKMVLTMMSGDVNIWPEYKNRTIFDITNNLSIVILALRPSDEGTYECVVLKYENDAFKREHLAEVTLSVKAD

SEQ ID NO: 1067 - protein, 107 aa, Artificial Sequence
  CD80 v426 IgV
VIHVTKEVKEVATLSCGHNVSVEELAQTRIYWQKDKKMVLTMMSGDMKIWPEYKNRTIFDITNNLSIMILALRPSDEGTYECVVLKYEKDAFKREHLAEVTLSVKAD

SEQ ID NO: 1068 - protein, 107 aa, Artificial Sequence
  CD80 v427 IgV
VIHVTKEVKEVATLSCGHNVSVEELAQTRIYWQKDKKMVLTMMSGDMKIWPEYKNRTIFDITNNLSIVILALRPSDEGTYECVVLKYENDAFKREHLAEVTLSVKAD

SEQ ID NO: 1069 - protein, 107 aa, Artificial Sequence
  CD80 v428 IgV
VIHVTKEVKEVATLSCGHNVSVEELAQTRIYWQKDKKMVLTMMSGDMNIWPEYKNRTIFDITNNLSIMILALRPSDEGTYECVVLKYENDAFKREHLAEVTLSVKAD

SEQ ID NO: 1070 - protein, 107 aa, Artificial Sequence
  CD80 v429 IgV
VIHVTKEVKEVATLSCGHNVSVEELAQTRIYWQKEKKMVLTMMSGDVKIWPEYKNRTIFDITNNLSIMILALRPSDEGTYECVVLKYEKDAFKREHLAEVTLSVKAD

SEQ ID NO: 1071 - protein, 107 aa, Artificial Sequence
  CD80 v430 IgV
VIHVTKEVKEVATLSCGHNVSVEELAQTRIYWQKEKKMVLTMMSGDVKIWPEYKNRTIFDITNNLSIVILALRPSDEGTYECVVLKYENDAFKREHLAEVTLSVKAD

SEQ ID NO: 1072 - protein, 107 aa, Artificial Sequence
  CD80 v431 IgV
VIHVTKEVKEVATLSCGHNVSVEELAQTRIYWQKEKKMVLTMMSGDVNIWPEYKNRTIFDITNNLSIMILALRPSDEGTYECVVLKYENDAFKREHLAEVTLSVKAD

SEQ ID NO: 1073 - protein, 107 aa, Artificial Sequence
  CD80 v432 IgV
VIHVTKEVKEVATLSCGHNVSVEELAQTRIYWQKEKKMVLTMMSGDMKIWPEYKNRTIFDITNNLSIMILALRPSDEGTYECVVLKYENDAFKREHLAEVTLSVKAD

SEQ ID NO: 1074 - protein, 107 aa, Artificial Sequence
  CD80 v433 IgV
VIHVTKEVKEVATLSCGHNVSVEELAQTRIYWQKDKKMVLTMMSGDVKIWPEYKNRTIFDITNNLSIVILALRPSDEGTYECVVLKYENDAFKREHLAEVTLSVKAD

SEQ ID NO: 1075 - protein, 107 aa, Artificial Sequence
  CD80 v434 IgV
VIHVTKEVKEVATLSCGHNVSVEELAQTRIYWQKDKKMVLTMMSGDVNIWPEYKNRTIFDITNNLSIMILALRPSDEGTYECVVLKYENDAFKREHLAEVTLSVKAD

SEQ ID NO: 1076 - protein, 107 aa, Artificial Sequence
  CD80 v435 IgV
VIHVTKEVKEVATLSCGHNVSVEELAQTRIYWQKDKKMVLTMMSGDMKIWPEYKNRTIFDITNNLSIMILALRPSDEGTYECVVLKYENDAFKREHLAEVTLSVKAD

SEQ ID NO: 1077 - protein, 107 aa, Artificial Sequence
  CD80 v436 IgV
VIHVTKEVKEVATLSCGHNVSVEELAQTRIYWQKEKKMVLTMMSGDVKIWPEYKNRTIFDITNNLSIMILALRPSDEGTYECVVLKYENDAFKREHLAEVTLSVKAD

SEQ ID NO: 1078 - protein, 107 aa, Artificial Sequence
  CD80 v437 IgV
VIHVTKEVKEVATLSCGHNVSVEELAQTRIYWQKDKKMVLTMMSGVVKIWPEYKNRTIFDITNNLSIMILALRPSDEGTYECVVLKYEKDAFKREHLAEVTLSVKAD

SEQ ID NO: 1079 - protein, 107 aa, Artificial Sequence
  CD80 v438 IgV
VIHVTKEVKEVATLSCGHNVSVEELAQTRIYWQKDKKMVLTMMSGVVNIWPEYKNRTIFDITNNLSIMILALRPSDEGTYECVVQKYEKDAFKREHLAEVTLSVKAD

SEQ ID NO: 1080 - protein, 107 aa, Artificial Sequence
  CD80 v439 IgV
VIHVTKEVKEVATLSCGHNVSVEELAQTRIYWQKDKKMVLTMMSGVVNIWPEYKNRTIFDITNNLSIMILALRPSDEGTYECVVLKYENDAFKREHLAEVTLSVKAD

SEQ ID NO: 1081 - protein, 107 aa, Artificial Sequence
  CD80 v440 IgV
VIHVTKEVKEVATLSCGHNVSVEELAQTRIYWQKDKKMVLTMMSGDVKIWPEYKNRTIFDITNNLSIMILALRPSDEGTYECVVQKYEKDAFKREHLAEVTLSVKAD

SEQ ID NO: 1082 - protein, 107 aa, Artificial Sequence
  CD80 v441 IgV
VIHVTKEVKEVATLSCGHNVSVEELAQTRIYWQKDKKMVLTMMSGDVNIWPEYKNRTIFDITNNLSIMILALRPSDEGTYECVVQKYENDAFKREHLAEVTLSVKAD

SEQ ID NO: 1083 - protein, 107 aa, Artificial Sequence
  CD80 v442 IgV
VIHVTKEVKEVATLSCGHNVSVEELEQTRIYWQKDKKMVLTMMSGDLNIWPEYKNRTIFDITNNLSIMILGLRPSDEGTYECVVLKYEKGAFKREHLAEVTLSVKAD

SEQ ID NO: 1084 - protein, 107 aa, Artificial Sequence
  CD80 v443 IgV
VIHVTKEVKEVATLSCGYNVSVEELAQTRIYWQKDKKMVLTMMSGDLNIWPEYKNRTIFDITNNLSIMILGLRPSDEGTYECVVLKYEKGAFKREHLAEVTLSVKAD

SEQ ID NO: 1085 - protein, 107 aa, Artificial Sequence
  CD80 v444 IgV
VIHVTKEVKEVATLSCGYNVSVEELEQTRIYWQKEKKMVLTMMSGDLNIWPEYKNRTIFDITNNLSIMILGLRPSDEGTYECVVLKYEKGAFKREHLAEVTLSVKAD

SEQ ID NO: 1086 - protein, 107 aa, Artificial Sequence
  CD80 v445 IgV
VIHVTKEVKEVATLSCGYNVSVEELEQTRIYWQKDKKMVLTMMSGDMNIWPEYKNRTIFDITNNLSIMILGLRPSDEGTYECVVLKYEKGAFKREHLAEVTLSVKAD

SEQ ID NO: 1087 - protein, 107 aa, Artificial Sequence
  CD80 v446 IgV
VIHVTKEVKEVATLSCGYNVSVEELEQTRIYWQKDKKMVLTMMSGDLNIWPEYKNRTIFDITNNLSIVILGLRPSDEGTYECVVLKYEKGAFKREHLAEVTLSVKAD

SEQ ID NO: 1088 - protein, 107 aa, Artificial Sequence
  CD80 v447 IgV
VIHVTKEVKEVATLSCGYNVSVEELEQTRIYWQKDKKMVLTMMSGDLNIWPEYKNRTIFDITNNLSIMILALRPSDEGTYECVVLKYEKGAFKREHLAEVTLSVKAD

SEQ ID NO: 1089 - protein, 107 aa, Artificial Sequence
  CD80 v448 IgV
VIHVTKEVKEVATLSCGYNVSVEELEQTRIYWQKDKKMVLTMMSGDLNIWPEYKNRTIFDITNNLSIMILGLRPSDEGTYECVVLKYEKDAFKREHLAEVTLSVKAD

SEQ ID NO: 1090 - protein, 107 aa, Artificial Sequence
  CD80 v449 IgV
VIHVTKEVKEVATLSCGHNVSVEELAQTRIYWQKDKKMVLTMMSGDLNIWPEYKNRTIFDITNNLSIMILGLRPSDEGTYECVVLKYEKGAFKREHLAEVTLSVKAD

SEQ ID NO: 1091 - protein, 107 aa, Artificial Sequence
  CD80 v450 IgV
VIHVTKEVKEVATLSCGYNVSVEELAQTRIYWQKEKKMVLTMMSGDLNIWPEYKNRTIFDITNNLSIMILGLRPSDEGTYECVVLKYEKGAFKREHLAEVTLSVKAD

SEQ ID NO: 1092 - protein, 107 aa, Artificial Sequence
  CD80 v451 IgV
VIHVTKEVKEVATLSCGYNVSVEELEQTRIYWQKEKKMVLTMMSGDMNIWPEYKNRTIFDITNNLSIMILGLRPSDEGTYECVVLKYEKGAFKREHLAEVTLSVKAD

SEQ ID NO: 1093 - protein, 107 aa, Artificial Sequence
  CD80 v452 IgV
VIHVTKEVKEVATLSCGYNVSVEELEQTRIYWQKDKKMVLTMMSGDMNIWPEYKNRTIFDITNNLSIVILGLRPSDEGTYECVVLKYEKGAFKREHLAEVTLSVKAD

SEQ ID NO: 1094 - protein, 107 aa, Artificial Sequence
  CD80 v453 IgV
VIHVTKEVKEVATLSCGYNVSVEELEQTRIYWQKDKKMVLTMMSGDLNIWPEYKNRTIFDITNNLSIVILALRPSDEGTYECVVLKYEKGAFKREHLAEVTLSVKAD

SEQ ID NO: 1095 - protein, 107 aa, Artificial Sequence
  CD80 v454 IgV
VIHVTKEVKEVATLSCGYNVSVEELEQTRIYWQKDKKMVLTMMSGDLNIWPEYKNRTIFDITNNLSIMILALRPSDEGTYECVVLKYEKDAFKREHLAEVTLSVKAD

SEQ ID NO: 1096 - protein, 107 aa, Artificial Sequence
  CD80 v455 IgV
VIHVTKEVKEVATLSCGHNVSVEELEQTRIYWQKEKKMVLTMMSGDLNIWPEYKNRTIFDITNNLSIMILGLRPSDEGTYECVVLKYEKGAFKREHLAEVTLSVKAD

SEQ ID NO: 1097 - protein, 107 aa, Artificial Sequence
  CD80 v456 IgV
VIHVTKEVKEVATLSCGHNVSVEELEQTRIYWQKDKKMVLTMMSGDMNIWPEYKNRTIFDITNNLSIMILGLRPSDEGTYECVVLKYEKGAFKREHLAEVTLSVKAD

SEQ ID NO: 1098 - protein, 107 aa, Artificial Sequence
  CD80 v457 IgV
VIHVTKEVKEVATLSCGHNVSVEELEQTRIYWQKDKKMVLTMMSGDLNIWPEYKNRTIFDITNNLSIVILGLRPSDEGTYECVVLKYEKGAFKREHLAEVTLSVKAD

SEQ ID NO: 1099 - protein, 107 aa, Artificial Sequence
  CD80 v458 IgV
VIHVTKEVKEVATLSCGHNVSVEELEQTRIYWQKDKKMVLTMMSGDLNIWPEYKNRTIFDITNNLSIMILALRPSDEGTYECVVLKYEKGAFKREHLAEVTLSVKAD

SEQ ID NO: 1100 - protein, 107 aa, Artificial Sequence
  CD80 v459 IgV
VIHVTKEVKEVATLSCGHNVSVEELEQTRIYWQKDKKMVLTMMSGDLNIWPEYKNRTIFDITNNLSIMILGLRPSDEGTYECVVLKYEKDAFKREHLAEVTLSVKAD

SEQ ID NO: 1101 - protein, 107 aa, Artificial Sequence
  CD80 v460 IgV
VIHVTKEVKEVATLSCGYNVSVEELAQTRIYWQKDKKMVLTMMSGDMNIWPEYKNRTIFDITNNLSIMILGLRPSDEGTYECVVLKYEKGAFKREHLAEVTLSVKAD

SEQ ID NO: 1102 - protein, 107 aa, Artificial Sequence
  CD80 v461 IgV
VIHVTKEVKEVATLSCGYNVSVEELAQTRIYWQKDKKMVLTMMSGDLNIWPEYKNRTIFDITNNLSIVILGLRPSDEGTYECVVLKYEKGAFKREHLAEVTLSVKAD

SEQ ID NO: 1103 - protein, 107 aa, Artificial Sequence
  CD80 v462 IgV
VIHVTKEVKEVATLSCGYNVSVEELAQTRIYWQKDKKMVLTMMSGDLNIWPEYKNRTIFDITNNLSIMILALRPSDEGTYECVVLKYEKGAFKREHLAEVTLSVKAD

SEQ ID NO: 1104 - protein, 107 aa, Artificial Sequence
  CD80 v463 IgV
VIHVTKEVKEVATLSCGYNVSVEELAQTRIYWQKDKKMVLTMMSGDLNIWPEYKNRTIFDITNNLSIMILGLRPSDEGTYECVVLKYEKDAFKREHLAEVTLSVKAD

SEQ ID NO: 1105 - protein, 107 aa, Artificial Sequence
  CD80 v464 IgV
VIHVTKEVKEVATLSCGYNVSVEELEQTRIYWQKEKKMVLTMMSGDLNIWPEYKNRTIFDITNNLSIVILGLRPSDEGTYECVVLKYEKGAFKREHLAEVTLSVKAD

SEQ ID NO: 1106 - protein, 107 aa, Artificial Sequence
  CD80 v465 IgV
VIHVTKEVKEVATLSCGYNVSVEELEQTRIYWQKEKKMVLTMMSGDLNIWPEYKNRTIFDITNNLSIMILALRPSDEGTYECVVLKYEKGAFKREHLAEVTLSVKAD

SEQ ID NO: 1107 - protein, 107 aa, Artificial Sequence
  CD80 v466 IgV
VIHVTKEVKEVATLSCGYNVSVEELEQTRIYWQKEKKMVLTMMSGDLNIWPEYKNRTIFDITNNLSIMILGLRPSDEGTYECVVLKYEKDAFKREHLAEVTLSVKAD

SEQ ID NO: 1108 - protein, 107 aa, Artificial Sequence
  CD80 v467 IgV
VIHVTKEVKEVATLSCGYNVSVEELEQTRIYWQKDKKMVLTMMSGDMNIWPEYKNRTIFDITNNLSIMILALRPSDEGTYECVVLKYEKGAFKREHLAEVTLSVKAD

SEQ ID NO: 1109 - protein, 107 aa, Artificial Sequence
  CD80 v468 IgV
VIHVTKEVKEVATLSCGYNVSVEELEQTRIYWQKDKKMVLTMMSGDMNIWPEYKNRTIFDITNNLSIMILGLRPSDEGTYECVVLKYEKDAFKREHLAEVTLSVKAD

SEQ ID NO: 1110 - protein, 107 aa, Artificial Sequence
  CD80 v469 IgV
VIHVTKEVKEVATLSCGYNVSVEELEQTRIYWQKDKKMVLTMMSGDLNIWPEYKNRTIFDITNNLSIVILGLRPSDEGTYECVVLKYEKDAFKREHLAEVTLSVKAD

SEQ ID NO: 1111 - protein, 107 aa, Artificial Sequence
  CD80 v470 IgV
VIHVTKEVKEVATLSCGHNVSVEELAQTRIYWQKEKKMVLTMMSGDLNIWPEYKNRTIFDITNNLSIMILGLRPSDEGTYECVVLKYEKGAFKREHLAEVTLSVKAD

SEQ ID NO: 1112 - protein, 107 aa, Artificial Sequence
  CD80 v471 IgV
VIHVTKEVKEVATLSCGYNVSVEELAQTRIYWQKEKKMVLTMMSGDMNIWPEYKNRTIFDITNNLSIMILGLRPSDEGTYECVVLKYEKGAFKREHLAEVTLSVKAD

SEQ ID NO: 1113 - protein, 107 aa, Artificial Sequence
  CD80 v472 IgV
VIHVTKEVKEVATLSCGYNVSVEELEQTRIYWQKEKKMVLTMMSGDMNIWPEYKNRTIFDITNNLSIVILGLRPSDEGTYECVVLKYEKGAFKREHLAEVTLSVKAD

SEQ ID NO: 1114 - protein, 107 aa, Artificial Sequence
  CD80 v473 IgV
VIHVTKEVKEVATLSCGYNVSVEELEQTRIYWQKDKKMVLTMMSGDMNIWPEYKNRTIFDITNNLSIVILALRPSDEGTYECVVLKYEKGAFKREHLAEVTLSVKAD

SEQ ID NO: 1115 - protein, 107 aa, Artificial Sequence
  CD80 v474 IgV
VIHVTKEVKEVATLSCGYNVSVEELEQTRIYWQKDKKMVLTMMSGDLNIWPEYKNRTIFDITNNLSIVILALRPSDEGTYECVVLKYEKDAFKREHLAEVTLSVKAD

SEQ ID NO: 1116 - protein, 107 aa, Artificial Sequence
  CD80 v475 IgV
VIHVTKEVKEVATLSCGHNVSVEELAQTRIYWQKDKKMVLTMMSGDMNIWPEYKNRTIFDITNNLSIMILGLRPSDEGTYECVVLKYEKGAFKREHLAEVTLSVKAD

SEQ ID NO: 1117 - protein, 107 aa, Artificial Sequence
  CD80 v476 IgV
VIHVTKEVKEVATLSCGHNVSVEELAQTRIYWQKDKKMVLTMMSGDLNIWPEYKNRTIFDITNNLSIVILGLRPSDEGTYECVVLKYEKGAFKREHLAEVTLSVKAD

SEQ ID NO: 1118 - protein, 107 aa, Artificial Sequence
  CD80 v477 IgV
VIHVTKEVKEVATLSCGHNVSVEELAQTRIYWQKDKKMVLTMMSGDLNIWPEYKNRTIFDITNNLSIMILALRPSDEGTYECVVLKYEKGAFKREHLAEVTLSVKAD

SEQ ID NO: 1119 - protein, 107 aa, Artificial Sequence
  CD80 v478 IgV
VIHVTKEVKEVATLSCGHNVSVEELAQTRIYWQKDKKMVLTMMSGDLNIWPEYKNRTIFDITNNLSIMILGLRPSDEGTYECVVLKYEKDAFKREHLAEVTLSVKAD

SEQ ID NO: 1120 - protein, 107 aa, Artificial Sequence
  CD80 v479 IgV
VIHVTKEVKEVATLSCGHNVSVEELEQTRIYWQKEKKMVLTMMSGDMNIWPEYKNRTIFDITNNLSIMILGLRPSDEGTYECVVLKYEKGAFKREHLAEVTLSVKAD

SEQ ID NO: 1121 - protein, 107 aa, Artificial Sequence
  CD80 v480 IgV
VIHVTKEVKEVATLSCGHNVSVEELEQTRIYWQKEKKMVLTMMSGDLNIWPEYKNRTIFDITNNLSIVILGLRPSDEGTYECVVLKYEKGAFKREHLAEVTLSVKAD

SEQ ID NO: 1122 - protein, 107 aa, Artificial Sequence
  CD80 v481 IgV
VIHVTKEVKEVATLSCGHNVSVEELEQTRIYWQKEKKMVLTMMSGDLNIWPEYKNRTIFDITNNLSIMILALRPSDEGTYECVVLKYEKGAFKREHLAEVTLSVKAD

SEQ ID NO: 1123 - protein, 107 aa, Artificial Sequence
  CD80 v482 IgV
VIHVTKEVKEVATLSCGHNVSVEELEQTRIYWQKEKKMVLTMMSGDLNIWPEYKNRTIFDITNNLSIMILGLRPSDEGTYECVVLKYEKDAFKREHLAEVTLSVKAD

SEQ ID NO: 1124 - protein, 107 aa, Artificial Sequence
  CD80 v483 IgV
VIHVTKEVKEVATLSCGHNVSVEELEQTRIYWQKDKKMVLTMMSGDMNIWPEYKNRTIFDITNNLSIVILGLRPSDEGTYECVVLKYEKGAFKREHLAEVTLSVKAD

SEQ ID NO: 1125 - protein, 107 aa, Artificial Sequence
  CD80 v484 IgV
VIHVTKEVKEVATLSCGHNVSVEELEQTRIYWQKDKKMVLTMMSGDMNIWPEYKNRTIFDITNNLSIMILALRPSDEGTYECVVLKYEKGAFKREHLAEVTLSVKAD

SEQ ID NO: 1126 - protein, 107 aa, Artificial Sequence
  CD80 v485 IgV
VIHVTKEVKEVATLSCGHNVSVEELEQTRIYWQKDKKMVLTMMSGDMNIWPEYKNRTIFDITNNLSIMILGLRPSDEGTYECVVLKYEKDAFKREHLAEVTLSVKAD

SEQ ID NO: 1127 - protein, 107 aa, Artificial Sequence
  CD80 v486 IgV
VIHVTKEVKEVATLSCGHNVSVEELEQTRIYWQKDKKMVLTMMSGDLNIWPEYKNRTIFDITNNLSIVILALRPSDEGTYECVVLKYEKGAFKREHLAEVTLSVKAD

SEQ ID NO: 1128 - protein, 107 aa, Artificial Sequence
  CD80 v487 IgV
VIHVTKEVKEVATLSCGHNVSVEELEQTRIYWQKDKKMVLTMMSGDLNIWPEYKNRTIFDITNNLSIMILALRPSDEGTYECVVLKYEKDAFKREHLAEVTLSVKAD

SEQ ID NO: 1129 - protein, 107 aa, Artificial Sequence
  CD80 v488 IgV
VIHVTKEVKEVATLSCGYNVSVEELAQTRIYWQKEKKMVLTMMSGDLNIWPEYKNRTIFDITNNLSIVILGLRPSDEGTYECVVLKYEKGAFKREHLAEVTLSVKAD

SEQ ID NO: 1130 - protein, 107 aa, Artificial Sequence
  CD80 v489 IgV
VIHVTKEVKEVATLSCGYNVSVEELAQTRIYWQKEKKMVLTMMSGDLNIWPEYKNRTIFDITNNLSIMILALRPSDEGTYECVVLKYEKGAFKREHLAEVTLSVKAD

SEQ ID NO: 1131 - protein, 107 aa, Artificial Sequence
  CD80 v490 IgV
VIHVTKEVKEVATLSCGYNVSVEELAQTRIYWQKEKKMVLTMMSGDLNIWPEYKNRTIFDITNNLSIMILGLRPSDEGTYECVVLKYEKDAFKREHLAEVTLSVKAD

SEQ ID NO: 1132 - protein, 107 aa, Artificial Sequence
  CD80 v491 IgV
VIHVTKEVKEVATLSCGYNVSVEELAQTRIYWQKDKKMVLTMMSGDMNIWPEYKNRTIFDITNNLSIVILGLRPSDEGTYECVVLKYEKGAFKREHLAEVTLSVKAD

SEQ ID NO: 1133 - protein, 107 aa, Artificial Sequence
  CD80 v492 IgV
VIHVTKEVKEVATLSCGYNVSVEELAQTRIYWQKDKKMVLTMMSGDMNIWPEYKNRTIFDITNNLSIMILALRPSDEGTYECVVLKYEKGAFKREHLAEVTLSVKAD

SEQ ID NO: 1134 - protein, 107 aa, Artificial Sequence
  CD80 v493 IgV
VIHVTKEVKEVATLSCGYNVSVEELAQTRIYWQKDKKMVLTMMSGDMNIWPEYKNRTIFDITNNLSIMILGLRPSDEGTYECVVLKYEKDAFKREHLAEVTLSVKAD

SEQ ID NO: 1135 - protein, 107 aa, Artificial Sequence
  CD80 v494 IgV
VIHVTKEVKEVATLSCGYNVSVEELAQTRIYWQKDKKMVLTMMSGDLNIWPEYKNRTIFDITNNLSIVILALRPSDEGTYECVVLKYEKGAFKREHLAEVTLSVKAD

SEQ ID NO: 1136 - protein, 107 aa, Artificial Sequence
  CD80 v495 IgV
VIHVTKEVKEVATLSCGYNVSVEELAQTRIYWQKDKKMVLTMMSGDLNIWPEYKNRTIFDITNNLSIVILGLRPSDEGTYECVVLKYEKDAFKREHLAEVTLSVKAD

SEQ ID NO: 1137 - protein, 107 aa, Artificial Sequence
  CD80 v496 IgV
VIHVTKEVKEVATLSCGYNVSVEELAQTRIYWQKDKKMVLTMMSGDLNIWPEYKNRTIFDITNNLSIMILALRPSDEGTYECVVLKYEKDAFKREHLAEVTLSVKAD

SEQ ID NO: 1138 - protein, 107 aa, Artificial Sequence
  CD80 v497 IgV
VIHVTKEVKEVATLSCGYNVSVEELEQTRIYWQKEKKMVLTMMSGDMNIWPEYKNRTIFDITNNLSIMILALRPSDEGTYECVVLKYEKGAFKREHLAEVTLSVKAD

SEQ ID NO: 1139 - protein, 107 aa, Artificial Sequence
  CD80 v498 IgV
VIHVTKEVKEVATLSCGYNVSVEELEQTRIYWQKEKKMVLTMMSGDMNIWPEYKNRTIFDITNNLSIMILGLRPSDEGTYECVVLKYEKDAFKREHLAEVTLSVKAD

SEQ ID NO: 1140 - protein, 107 aa, Artificial Sequence
  CD80 v499 IgV
VIHVTKEVKEVATLSCGYNVSVEELEQTRIYWQKEKKMVLTMMSGDLNIWPEYKNRTIFDITNNLSIVILALRPSDEGTYECVVLKYEKGAFKREHLAEVTLSVKAD

SEQ ID NO: 1141 - protein, 107 aa, Artificial Sequence
  CD80 v500 IgV
VIHVTKEVKEVATLSCGYNVSVEELEQTRIYWQKEKKMVLTMMSGDLNIWPEYKNRTIFDITNNLSIVILGLRPSDEGTYECVVLKYEKDAFKREHLAEVTLSVKAD

SEQ ID NO: 1142 - protein, 107 aa, Artificial Sequence
  CD80 v501 IgV
VIHVTKEVKEVATLSCGYNVSVEELEQTRIYWQKEKKMVLTMMSGDLNIWPEYKNRTIFDITNNLSIMILALRPSDEGTYECVVLKYEKDAFKREHLAEVTLSVKAD

SEQ ID NO: 1143 - protein, 107 aa, Artificial Sequence
  CD80 v502 IgV
VIHVTKEVKEVATLSCGYNVSVEELEQTRIYWQKDKKMVLTMMSGDMNIWPEYKNRTIFDITNNLSIVILGLRPSDEGTYECVVLKYEKDAFKREHLAEVTLSVKAD

SEQ ID NO: 1144 - protein, 107 aa, Artificial Sequence
  CD80 v503 IgV
VIHVTKEVKEVATLSCGYNVSVEELEQTRIYWQKDKKMVLTMMSGDMNIWPEYKNRTIFDITNNLSIMILALRPSDEGTYECVVLKYEKDAFKREHLAEVTLSVKAD

SEQ ID NO: 1145 - protein, 208 aa, Artificial Sequence
  CD80 v504 ECD
VIHVTKEVKEVATLSCGYNVSVEELAQTRIYWQKDKKMVLTMMSGDVNIWPEYKNRTIFDITNNLSIMILGLRPSDEGTYECVVLKYEKDAFKREHLAEVTLSVKADFPTPSISDFETPTSNIRRIICSTSGGFPEPHLSWLENGEELNAINTTVSQDPETELYAVSSKLDFNMTTNHSFMCLIKYGHLRVNQTFNWNTTKQEHFPDN

SEQ ID NO: 1146 - protein, 208 aa, Artificial Sequence
  CD80 v505 ECD
VIHVTKEVKEVATLSCGCNVSVEELPQTRIYWQKDKKMVLTMMSGDLNIWPEYKNRTIFDITNNLSIMILGLRPSDEGTYECVVLKYEKDAFKREHLAEVTLSVKADFPTPSISDFETPTSNIRRIICSTSGGFPEPHLSWLENGEELNAINTTVSQDPETELYAVSSKLDFNMTTNHSFMCLIKYGHLRVNQTFNWNTTKQEHFPDN

SEQ ID NO: 1147 - protein, 208 aa, Artificial Sequence
  CD80 v506 ECD
VIHVTKEVKEVATLSCGINVSVEELPQTRIYWQKDKKMVLTMMSGDVNIWPEYKNRTIFDITNNLSIMILGLRPSDEGTYECVVLKYEKDAFKREHLAEVTLSVKADFPTPSISDFETPTSNIRRIICSTSGGFPEPHLSWLENGEELNAINTTVSQDPETELYAVSSKLDFNMTTNHSFMCLIKYGHLRVNQTFNWNTTKQEHFPDN

SEQ ID NO: 1148 - protein, 208 aa, Artificial Sequence
  CD80 v507 ECD
VIHVTKEVKEVATLSCGLNVSVEELNQTRIYWQKEKKMVLTMMSGEMNIWPEYKNRTIFDITNNLSIMILGLRPSDEGTYECVVLKYEKGAFKREHLAEVTLSVKADFPTPSISDFETPTSNIRRIICSTSGGFPEPHLSWLENGEELNAINTTVSQDPETELYAVSSKLDFNMTTNHSFMCLIKYGHLRVNQTFNWNTTKQEHFPDN

SEQ ID NO: 1149 - protein, 208 aa, Artificial Sequence
  CD80 v508 ECD
VIHVTKEVKEVATLSCGLNVSVEELAQTRIYWQKDKKMVLTMMSGDVNIWPEYKNRTIFDITNNLSIMILGLRPSDEGTYECVVLKYEKGAFKREHLAEVTLSVKADFPTPSISDFETPTSNIRRIICSTSGGFPEPHLSWLENGEELNAINTTVSQDPETELYAVSSKLDFNMTTNHSFMCLIKYGHLRVNQTFNWNTTKQEHFPDN

SEQ ID NO: 1150 - protein, 208 aa, Artificial Sequence
  CD80 v509 ECD
VIHVTKEVKEVATLSCGTNVSVEELNQTRIYWQKDKKMVLTMMSGDLNIWPEYKNRTIFDITNNLSIMILGLRPSDEGTYECVVLKYEKDAFKREHLAEVTLSVKADFPTPSISDFETPTSNIRRIICSTSGGFPEPHLSWLENGEELNAINTTVSQDPETELYAVSSKLDFNMTTNHSFMCLIKYGHLRVNQTFNWNTTKQEHFPDN

SEQ ID NO: 1151 - protein, 208 aa, Artificial Sequence
  CD80 v510 ECD
VIHVTKEVKEVATLSCGVNVSVEELKQTRIYWQKDKKMVLTMMSGDLNIWPEYKNRTIFDITNNLSIMILGLRPSDEGTYECVVLKYEKDAFKREHLAEVTLSVKADFPTPSISDFETPTSNIRRIICSTSGGFPEPHLSWLENGEELNAINTTVSQDPETELYAVSSKLDFNMTTNHSFMCLIKYGHLRVNQTFNWNTTKQEHFPDN

SEQ ID NO: 1152 - protein, 208 aa, Artificial Sequence
  CD80 v511 ECD
VIHVTKEVKEVATLSCGVNVSVEELNQTRIYWQKDKKMVLTMMSGDVNIWPEYKNRTIFDITNNLSIMILGLRPSDEGTYECVVLKYEKDAFKREHLAEVTLSVKADFPTPSISDFETPTSNIRRIICSTSGGFPEPHLSWLENGEELNAINTTVSQDPETELYAVSSKLDFNMTTNHSFMCLIKYGHLRVNQTFNWNTTKQEHFPDN

SEQ ID NO: 1153 - protein, 208 aa, Artificial Sequence
  CD80 v512 ECD
VIHVTKEVKEVATLSCGVNVSVEELPQTRIYWQKDKKMVLTMMSGDVNIWPEYKNRTIFDITNNLSILILGLRPSDEGTYECVVLKYEKDAFKREHLAEVTLSVKADFPTPSISDFETPTSNIRRIICSTSGGFPEPHLSWLENGEELNAINTTVSQDPETELYAVSSKLDFNMTTNHSFMCLIKYGHLRVNQTFNWNTTKQEHFPDN

SEQ ID NO: 1154 - protein, 208 aa, Artificial Sequence
  CD80 v513 ECD
VIHVTKEVKEVATLSCGVNVSVEELPQTRIYWQKDKKMVLTMMSGDLNIWPEYKNRTIFDITNNLSIMILGLRPSDEGTYECVVLKYEKDAFKREHLAEVTLSVKADFPTPSISDFETPTSNIRRIICSTSGGFPEPHLSWLENGEELNAINTTVSQDPETELYAVSSKLDFNMTTNHSFMCLIKYGHLRVNQTFNWNTTKQEHFPDN

SEQ ID NO: 1155 - protein, 208 aa, Artificial Sequence
  CD80 v514 ECD
VIHVTKEVKEVATLSCGVNVSVEELAQTRIYWQKDKKMVLTMMSGDVNIWPEYKNRTIFDITNNLSIMILGLRPSDEGTYECVVLKYEKGAFKREHLAEVTLSVKADFPTPSISDFETPTSNIRRIICSTSGGFPEPHLSWLENGEELNAINTTVSQDPETELYAVSSKLDFNMTTNHSFMCLIKYGHLRVNQTFNWNTTKQEHFPDN

SEQ ID NO: 1156 - protein, 208 aa, Artificial Sequence
  CD80 v515 ECD
VIHVTKEVKEVATLSCGYNVSVEELPQTRIYWQKDKKMVLTMMSGDINIWPEYKNRTIFDITNNLSIMILGLRPSDEGTYECVVLKYEKDAFKREHLAEVTLSVKADFPTPSISDFETPTSNIRRIICSTSGGFPEPHLSWLENGEELNAINTTVSQDPETELYAVSSKLDFNMTTNHSFMCLIKYGHLRVNQTFNWNTTKQEHFPDN

SEQ ID NO: 1157 - protein, 208 aa, Artificial Sequence
  CD80 v516 ECD
VIHVTKEVKEVATLSCGYNVSVEELPQTRIYWQKDKKMVLTMMSGDVNIWPEYKNRTIFDITNNLSIMILGLRPSDEGTYECVVLKYEKDAFKREHLAEVTLSVKADFPTPSISDFETPTSNIRRIICSTSGGFPEPHLSWLENGEELNAINTTVSQDPETELYAVSSKLDFNMTTNHSFMCLIKYGHLRVNQTFNWNTTKQEHFPDN

SEQ ID NO: 1158 - protein, 208 aa, Artificial Sequence
  CD80 v517 ECD
VIHVTKEVKEVATLSCGYNVSVEELAQTRIYWQKDKKMVLTMMSGDVNIWPEYKNRTIFDITNNLSILILGLRPSDEGTYECVVLKYEKGAFKREHLAEVTLSVKADFPTPSISDFETPTSNIRRIICSTSGGFPEPHLSWLENGEELNAINTTVSQDPETELYAVSSKLDFNMTTNHSFMCLIKYGHLRVNQTFNWNTTKQEHFPDN

SEQ ID NO: 1159 - protein, 208 aa, Artificial Sequence
  CD80 v518 ECD
VIHVTKEVKEVATLSCGYNVSVEELAQTRIYWQKDKKMVLTMMSGDVNIWPEYKNRTIFDITNNLSIMILGLRPSDEGTYECVVLKYEKGAFKREHLAEVTLSVKADFPTPSISDFETPTSNIRRIICSTSGGFPEPHLSWLENGEELNAINTTVSQDPETELYAVSSKLDFNMTTNHSFMCLIKYGHLRVNQTFNWNTTKQEHFPDN

SEQ ID NO: 1160 - protein, 208 aa, Artificial Sequence
  CD80 v519 ECD
VIHVTKEVKEVATLSCGHNVSVEELPQTRIYWQKDKKMVLTMMSGDINIWPEYKNRTIFDITNNLSIMILGLRPSDEGTYECVVLKYEKGAFKREHLAEVTLSVKADFPTPSISDFETPTSNIRRIICSTSGGFPEPHLSWLENGEELNAINTTVSQDPETELYAVSSKLDFNMTTNHSFMCLIKYGHLRVNQTFNWNTTKQEHFPDN

SEQ ID NO: 1161 - protein, 208 aa, Artificial Sequence
  CD80 v520 ECD
VIHVTKEVKEVATLSCGVNVSVEELGQTRIYWQKDKKMVLTMMSGDVNIWPEYKNRTIFDITNNLSIMILGLRPSDEGTYECVVLKYEKGAFKREHLAEVTLSVKADFPTPSISDFETPTSNIRRIICSTSGGFPEPHLSWLENGEELNAINTTVSQDPETELYAVSSKLDFNMTTNHSFMCLIKYGHLRVNQTFNWNTTKQEHFPDN

SEQ ID NO: 1162 - protein, 208 aa, Artificial Sequence
  CD80 v521 ECD
VIHVTKEVKEVATLSCGVNVSVEELSQTRIYWQKDKKMVLTMMSGDLNIWPEYKNRTIFDITNNLSIMILGLRPSDEGTYECVVLKYEKGAFKREHLAEVTLSVKADFPTPSISDFETPTSNIRRIICSTSGGFPEPHLSWLENGEELNAINTTVSQDPETELYAVSSKLDFNMTTNHSFMCLIKYGHLRVNQTFNWNTTKQEHFPDN

SEQ ID NO: 1163 - protein, 208 aa, Artificial Sequence
  CD80 v522 ECD
VIHVTKEVKEVATLSCGVNVSVEELRQTRIYWQKDKKMVLTMMSGDLNIWPEYKNRTIFDITNNLSIMILGLRPSDEGTYECVVLKYEKGAFKREHLAEVTLSVKADFPTPSISDFETPTSNIRRIICSTSGGFPEPHLSWLENGEELNAINTTVSQDPETELYAVSSKLDFNMTTNHSFMCLIKYGHLRVNQTFNWNTTKQEHFPDN

SEQ ID NO: 1164 - protein, 208 aa, Artificial Sequence
  CD80 v523 ECD
VIHVTKEVKEVATLSCGVNVSVEELDQTRIYWQKDKKMVLTMMSGDVNIWPEYKNRTIFDITNNLSIMILGLRPSDEGTYECVVLKYEKGAFKREHLAEVTLSVKADFPTPSISDFETPTSNIRRIICSTSGGFPEPHLSWLENGEELNAINTTVSQDPETELYAVSSKLDFNMTTNHSFMCLIKYGHLRVNQTFNWNTTKQEHFPDN

SEQ ID NO: 1165 - protein, 208 aa, Artificial Sequence
  CD80 v524 ECD
VIHVTKEVKEVATLSCGVNVSVEELQQTRIYWQKDKKMVLTMMSGDVNIWPEYKNRTIFDITNNLSILILGLRPSDEGTYECVVLKYEKGAFKREHLAEVTLSVKADFPTPSISDFETPTSNIRRIICSTSGGFPEPHLSWLENGEELNAINTTVSQDPETELYAVSSKLDFNMTTNHSFMCLIKYGHLRVNQTFNWNTTKQEHFPDN

SEQ ID NO: 1166 - protein, 208 aa, Artificial Sequence
  CD80 v525 ECD
VIHVTKEVKEVATLSCGANVSVEELPQTRIYWQKDKKMVLTMMSGDLNIWPEYKNRTIFDITNNLSIMILGLRPSDEGTYECVVLKYEKGAFKREHLAEVTLSVKADFPTPSISDFETPTSNIRRIICSTSGGFPEPHLSWLENGEELNAINTTVSQDPETELYAVSSKLDFNMTTNHSFMCLIKYGHLRVNQTFNWNTTKQEHFPDN

SEQ ID NO: 1167 - protein, 208 aa, Artificial Sequence
  CD80 v526 ECD
VIHVTKEVKEVATLSCGANVSVEELNQTRIYWQKDKKMVLTMMSGDLNIWPEYKNRTIFDITNNLSIMILGLRPSDEGTYECVVLKYEKGAFKREHLAEVTLSVKADFPTPSISDFETPTSNIRRIICSTSGGFPEPHLSWLENGEELNAINTTVSQDPETELYAVSSKLDFNMTTNHSFMCLIKYGHLRVNQTFNWNTTKQEHFPDN

SEQ ID NO: 1168 - protein, 208 aa, Artificial Sequence
  CD80 v527 ECD
VIHVTKEVKEVATLSCGFNVSVEELPQTRIYWQKDKKMVLTMMSGDINIWPEYKNRTIFDITNNLSIMILGLRPSDEGTYECVVLKYEKGAFKREHLAEVTLSVKADFPTPSISDFETPTSNIRRIICSTSGGFPEPHLSWLENGEELNAINTTVSQDPETELYAVSSKLDFNMTTNHSFMCLIKYGHLRVNQTFNWNTTKQEHFPDN

SEQ ID NO: 1169 - protein, 208 aa, Artificial Sequence
  CD80 v528 ECD
VIHVTKEVKEVATLSCGFNVSVEELHQTRIYWQKDKKMVLTMMSGDLNIWPEYKNRTIFDITNNLSIMILGLRPSDEGTYECVVLKYEKGAFKREHLAEVTLSVKADFPTPSISDFETPTSNIRRIICSTSGGFPEPHLSWLENGEELNAINTTVSQDPETELYAVSSKLDFNMTTNHSFMCLIKYGHLRVNQTFNWNTTKQEHFPDN

SEQ ID NO: 1170 - protein, 208 aa, Artificial Sequence
  CD80 v529 ECD
VIHVTKEVKEVATLSCGFNVSVEELNQTRIYWQKDKKMVLTMMSGDVNIWPEYKNRTIFDITNNLSIMILGLRPSDEGTYECVVLKYEKKAFKREHLAEVTLSVKADFPTPSISDFETPTSNIRRIICSTSGGFPEPHLSWLENGEELNAINTTVSQDPETELYAVSSKLDFNMTTNHSFMCLIKYGHLRVNQTFNWNTTKQEHFPDN

SEQ ID NO: 1171 - protein, 208 aa, Artificial Sequence
  CD80 v530 ECD
VIHVTKEVKEVATLSCGYNVSVEELNQTRIYWQKDKKMVLTMMSGDFNIWPEYKNRTIFDITNNLSIMILGLRPSDEGTYECVVLKYEKGAFKREHLAEVTLSVKADFPTPSISDFETPTSNIRRIICSTSGGFPEPHLSWLENGEELNAINTTVSQDPETELYAVSSKLDFNMTTNHSFMCLIKYGHLRVNQTFNWNTTKQEHFPDN

SEQ ID NO: 1172 - protein, 208 aa, Artificial Sequence
  CD80 v531 ECD
VIHVTKEVKEVATLSCGYNVSVEELPQTRIYWQKDKKMVLTMMSGDYNIWPEYKNRTIFDITNNLSIIILGLRPSDEGTYECVVLKYEKGAFKREHLAEVTLSVKADFPTPSISDFETPTSNIRRIICSTSGGFPEPHLSWLENGEELNAINTTVSQDPETELYAVSSKLDFNMTTNHSFMCLIKYGHLRVNQTFNWNTTKQEHFPDN

SEQ ID NO: 1173 - protein, 208 aa, Artificial Sequence
  CD80 v532 ECD
VIHVTKEVKEVATLSCGYNVSVEELQQTRIYWQKDKKMVLTMMSGDTNIWPEYKNRTIFDITNNLSIMILGLRPSDEGTYECVVLKYEKGAFKREHLAEVTLSVKADFPTPSISDFETPTSNIRRIICSTSGGFPEPHLSWLENGEELNAINTTVSQDPETELYAVSSKLDFNMTTNHSFMCLIKYGHLRVNQTFNWNTTKQEHFPDN

SEQ ID NO: 1174 - protein, 208 aa, Artificial Sequence
  CD80 v533 ECD
VIHVTKEVKEVATLSCGRNVSVEELPQTRIYWQKDKKMVLTMMSGNVNIWPEYKNRTIFDITNNLSIMILGLRPSDEGTYECVVLKYEKPAFKREHLAEVTLSVKADFPTPSISDFETPTSNIRRIICSTSGGFPEPHLSWLENGEELNAINTTVSQDPETELYAVSSKLDFNMTTNHSFMCLIKYGHLRVNQTFNWNTTKQEHFPDN

SEQ ID NO: 1175 - protein, 208 aa, Artificial Sequence
  CD80 v534 ECD
VIHVTKEVKEVATLSCGFNVSVEELDQTRIYWQKDKKMVLTMMSGETNIWPEYKNRTIFDITNNLSIMILGLRPSDEGTYECVVLKYEKGAFKREHLAEVTLSVKADFPTPSISDFETPTSNIRRIICSTSGGFPEPHLSWLENGEELNAINTTVSQDPETELYAVSSKLDFNMTTNHSFMCLIKYGHLRVNQTFNWNTTKQEHFPDN

SEQ ID NO: 1176 - protein, 101 aa, Artificial Sequence
  CD80 v504 IgV
VIHVTKEVKEVATLSCGYNVSVEELAQTRIYWQKDKKMVLTMMSGDVNIWPEYKNRTIFDITNNLSIMILGLRPSDEGTYECVVLKYEKDAFKREHLAEVT

SEQ ID NO: 1177 - protein, 101 aa, Artificial Sequence
  CD80 v505 IgV
VIHVTKEVKEVATLSCGCNVSVEELPQTRIYWQKDKKMVLTMMSGDLNIWPEYKNRTIFDITNNLSIMILGLRPSDEGTYECVVLKYEKDAFKREHLAEVT

SEQ ID NO: 1178 - protein, 101 aa, Artificial Sequence
  CD80 v506 IgV
VIHVTKEVKEVATLSCGINVSVEELPQTRIYWQKDKKMVLTMMSGDVNIWPEYKNRTIFDITNNLSIMILGLRPSDEGTYECVVLKYEKDAFKREHLAEVT

SEQ ID NO: 1179 - protein, 101 aa, Artificial Sequence
  CD80 v507 IgV
VIHVTKEVKEVATLSCGLNVSVEELNQTRIYWQKEKKMVLTMMSGEMNIWPEYKNRTIFDITNNLSIMILGLRPSDEGTYECVVLKYEKGAFKREHLAEVT

SEQ ID NO: 1180 - protein, 101 aa, Artificial Sequence
  CD80 v508 IgV
VIHVTKEVKEVATLSCGLNVSVEELAQTRIYWQKDKKMVLTMMSGDVNIWPEYKNRTIFDITNNLSIMILGLRPSDEGTYECVVLKYEKGAFKREHLAEVT

SEQ ID NO: 1181 - protein, 101 aa, Artificial Sequence
  CD80 v509 IgV
VIHVTKEVKEVATLSCGTNVSVEELNQTRIYWQKDKKMVLTMMSGDLNIWPEYKNRTIFDITNNLSIMILGLRPSDEGTYECVVLKYEKDAFKREHLAEVT

SEQ ID NO: 1182 - protein, 101 aa, Artificial Sequence
  CD80 v510 IgV
VIHVTKEVKEVATLSCGVNVSVEELKQTRIYWQKDKKMVLTMMSGDLNIWPEYKNRTIFDITNNLSIMILGLRPSDEGTYECVVLKYEKDAFKREHLAEVT

SEQ ID NO: 1183 - protein, 101 aa, Artificial Sequence
  CD80 v511 IgV
VIHVTKEVKEVATLSCGVNVSVEELNQTRIYWQKDKKMVLTMMSGDVNIWPEYKNRTIFDITNNLSIMILGLRPSDEGTYECVVLKYEKDAFKREHLAEVT

SEQ ID NO: 1184 - protein, 101 aa, Artificial Sequence
  CD80 v512 IgV
VIHVTKEVKEVATLSCGVNVSVEELPQTRIYWQKDKKMVLTMMSGDVNIWPEYKNRTIFDITNNLSILILGLRPSDEGTYECVVLKYEKDAFKREHLAEVT

SEQ ID NO: 1185 - protein, 101 aa, Artificial Sequence
  CD80 v513 IgV
VIHVTKEVKEVATLSCGVNVSVEELPQTRIYWQKDKKMVLTMMSGDLNIWPEYKNRTIFDITNNLSIMILGLRPSDEGTYECVVLKYEKDAFKREHLAEVT

SEQ ID NO: 1186 - protein, 101 aa, Artificial Sequence
  CD80 v514 IgV
VIHVTKEVKEVATLSCGVNVSVEELAQTRIYWQKDKKMVLTMMSGDVNIWPEYKNRTIFDITNNLSIMILGLRPSDEGTYECVVLKYEKGAFKREHLAEVT

SEQ ID NO: 1187 - protein, 101 aa, Artificial Sequence
  CD80 v515 IgV
VIHVTKEVKEVATLSCGYNVSVEELPQTRIYWQKDKKMVLTMMSGDINIWPEYKNRTIFDITNNLSIMILGLRPSDEGTYECVVLKYEKDAFKREHLAEVT

SEQ ID NO: 1188 - protein, 101 aa, Artificial Sequence
  CD80 v516 IgV
VIHVTKEVKEVATLSCGYNVSVEELPQTRIYWQKDKKMVLTMMSGDVNIWPEYKNRTIFDITNNLSIMILGLRPSDEGTYECVVLKYEKDAFKREHLAEVT

SEQ ID NO: 1189 - protein, 101 aa, Artificial Sequence
  CD80 v517 IgV
VIHVTKEVKEVATLSCGYNVSVEELAQTRIYWQKDKKMVLTMMSGDVNIWPEYKNRTIFDITNNLSILILGLRPSDEGTYECVVLKYEKGAFKREHLAEVT

SEQ ID NO: 1190 - protein, 101 aa, Artificial Sequence
  CD80 v518 IgV
VIHVTKEVKEVATLSCGYNVSVEELAQTRIYWQKDKKMVLTMMSGDVNIWPEYKNRTIFDITNNLSIMILGLRPSDEGTYECVVLKYEKGAFKREHLAEVT

SEQ ID NO: 1191 - protein, 101 aa, Artificial Sequence
  CD80 v519 IgV
VIHVTKEVKEVATLSCGHNVSVEELPQTRIYWQKDKKMVLTMMSGDINIWPEYKNRTIFDITNNLSIMILGLRPSDEGTYECVVLKYEKGAFKREHLAEVT

SEQ ID NO: 1192 - protein, 101 aa, Artificial Sequence
  CD80 v520 IgV
VIHVTKEVKEVATLSCGVNVSVEELGQTRIYWQKDKKMVLTMMSGDVNIWPEYKNRTIFDITNNLSIMILGLRPSDEGTYECVVLKYEKGAFKREHLAEVT

SEQ ID NO: 1193 - protein, 101 aa, Artificial Sequence
  CD80 v521 IgV
VIHVTKEVKEVATLSCGVNVSVEELSQTRIYWQKDKKMVLTMMSGDLNIWPEYKNRTIFDITNNLSIMILGLRPSDEGTYECVVLKYEKGAFKREHLAEVT

SEQ ID NO: 1194 - protein, 101 aa, Artificial Sequence
  CD80 v522 IgV
VIHVTKEVKEVATLSCGVNVSVEELRQTRIYWQKDKKMVLTMMSGDLNIWPEYKNRTIFDITNNLSIMILGLRPSDEGTYECVVLKYEKGAFKREHLAEVT

SEQ ID NO: 1195 - protein, 101 aa, Artificial Sequence
  CD80 v523 IgV
VIHVTKEVKEVATLSCGVNVSVEELDQTRIYWQKDKKMVLTMMSGDVNIWPEYKNRTIFDITNNLSIMILGLRPSDEGTYECVVLKYEKGAFKREHLAEVT

SEQ ID NO: 1196 - protein, 101 aa, Artificial Sequence
  CD80 v524 IgV
VIHVTKEVKEVATLSCGVNVSVEELQQTRIYWQKDKKMVLTMMSGDVNIWPEYKNRTIFDITNNLSILILGLRPSDEGTYECVVLKYEKGAFKREHLAEVT

SEQ ID NO: 1197 - protein, 101 aa, Artificial Sequence
  CD80 v525 IgV
VIHVTKEVKEVATLSCGANVSVEELPQTRIYWQKDKKMVLTMMSGDLNIWPEYKNRTIFDITNNLSIMILGLRPSDEGTYECVVLKYEKGAFKREHLAEVT

SEQ ID NO: 1198 - protein, 101 aa, Artificial Sequence
  CD80 v526 IgV
VIHVTKEVKEVATLSCGANVSVEELNQTRIYWQKDKKMVLTMMSGDLNIWPEYKNRTIFDITNNLSIMILGLRPSDEGTYECVVLKYEKGAFKREHLAEVT

SEQ ID NO: 1199 - protein, 101 aa, Artificial Sequence
  CD80 v527 IgV
VIHVTKEVKEVATLSCGFNVSVEELPQTRIYWQKDKKMVLTMMSGDINIWPEYKNRTIFDITNNLSIMILGLRPSDEGTYECVVLKYEKGAFKREHLAEVT

SEQ ID NO: 1200 - protein, 101 aa, Artificial Sequence
  CD80 v528 IgV
VIHVTKEVKEVATLSCGFNVSVEELHQTRIYWQKDKKMVLTMMSGDLNIWPEYKNRTIFDITNNLSIMILGLRPSDEGTYECVVLKYEKGAFKREHLAEVT

SEQ ID NO: 1201 - protein, 101 aa, Artificial Sequence
  CD80 v529 IgV
VIHVTKEVKEVATLSCGFNVSVEELNQTRIYWQKDKKMVLTMMSGDVNIWPEYKNRTIFDITNNLSIMILGLRPSDEGTYECVVLKYEKKAFKREHLAEVT

SEQ ID NO: 1202 - protein, 101 aa, Artificial Sequence
  CD80 v530 IgV
VIHVTKEVKEVATLSCGYNVSVEELNQTRIYWQKDKKMVLTMMSGDFNIWPEYKNRTIFDITNNLSIMILGLRPSDEGTYECVVLKYEKGAFKREHLAEVT

SEQ ID NO: 1203 - protein, 101 aa, Artificial Sequence
  CD80 v531 IgV
VIHVTKEVKEVATLSCGYNVSVEELPQTRIYWQKDKKMVLTMMSGDYNIWPEYKNRTIFDITNNLSIIILGLRPSDEGTYECVVLKYEKGAFKREHLAEVT

SEQ ID NO: 1204 - protein, 101 aa, Artificial Sequence
  CD80 v532 IgV
VIHVTKEVKEVATLSCGYNVSVEELQQTRIYWQKDKKMVLTMMSGDTNIWPEYKNRTIFDITNNLSIMILGLRPSDEGTYECVVLKYEKGAFKREHLAEVT

SEQ ID NO: 1205 - protein, 101 aa, Artificial Sequence
  CD80 v533 IgV
VIHVTKEVKEVATLSCGRNVSVEELPQTRIYWQKDKKMVLTMMSGNVNIWPEYKNRTIFDITNNLSIMILGLRPSDEGTYECVVLKYEKPAFKREHLAEVT

SEQ ID NO: 1206 - protein, 101 aa, Artificial Sequence
  CD80 v534 IgV
VIHVTKEVKEVATLSCGFNVSVEELDQTRIYWQKDKKMVLTMMSGETNIWPEYKNRTIFDITNNLSIMILGLRPSDEGTYECVVLKYEKGAFKREHLAEVT

SEQ ID NO: 1207 - protein, 107 aa, Artificial Sequence
  CD80 v504 IgV
VIHVTKEVKEVATLSCGYNVSVEELAQTRIYWQKDKKMVLTMMSGDVNIWPEYKNRTIFDITNNLSIMILGLRPSDEGTYECVVLKYEKDAFKREHLAEVTLSVKAD

SEQ ID NO: 1208 - protein, 107 aa, Artificial Sequence
  CD80 v505 IgV
VIHVTKEVKEVATLSCGCNVSVEELPQTRIYWQKDKKMVLTMMSGDLNIWPEYKNRTIFDITNNLSIMILGLRPSDEGTYECVVLKYEKDAFKREHLAEVTLSVKAD

SEQ ID NO: 1209 - protein, 107 aa, Artificial Sequence
  CD80 v506 IgV
VIHVTKEVKEVATLSCGINVSVEELPQTRIYWQKDKKMVLTMMSGDVNIWPEYKNRTIFDITNNLSIMILGLRPSDEGTYECVVLKYEKDAFKREHLAEVTLSVKAD

SEQ ID NO: 1210 - protein, 107 aa, Artificial Sequence
  CD80 v507 IgV
VIHVTKEVKEVATLSCGLNVSVEELNQTRIYWQKEKKMVLTMMSGEMNIWPEYKNRTIFDITNNLSIMILGLRPSDEGTYECVVLKYEKGAFKREHLAEVTLSVKAD

SEQ ID NO: 1211 - protein, 107 aa, Artificial Sequence
  CD80 v508 IgV
VIHVTKEVKEVATLSCGLNVSVEELAQTRIYWQKDKKMVLTMMSGDVNIWPEYKNRTIFDITNNLSIMILGLRPSDEGTYECVVLKYEKGAFKREHLAEVTLSVKAD

SEQ ID NO: 1212 - protein, 107 aa, Artificial Sequence
  CD80 v509 IgV
VIHVTKEVKEVATLSCGTNVSVEELNQTRIYWQKDKKMVLTMMSGDLNIWPEYKNRTIFDITNNLSIMILGLRPSDEGTYECVVLKYEKDAFKREHLAEVTLSVKAD

SEQ ID NO: 1213 - protein, 107 aa, Artificial Sequence
  CD80 v510 IgV
VIHVTKEVKEVATLSCGVNVSVEELKQTRIYWQKDKKMVLTMMSGDLNIWPEYKNRTIFDITNNLSIMILGLRPSDEGTYECVVLKYEKDAFKREHLAEVTLSVKAD

SEQ ID NO: 1214 - protein, 107 aa, Artificial Sequence
  CD80 v511 IgV
VIHVTKEVKEVATLSCGVNVSVEELNQTRIYWQKDKKMVLTMMSGDVNIWPEYKNRTIFDITNNLSIMILGLRPSDEGTYECVVLKYEKDAFKREHLAEVTLSVKAD

SEQ ID NO: 1215 - protein, 107 aa, Artificial Sequence
  CD80 v512 IgV
VIHVTKEVKEVATLSCGVNVSVEELPQTRIYWQKDKKMVLTMMSGDVNIWPEYKNRTIFDITNNLSILILGLRPSDEGTYECVVLKYEKDAFKREHLAEVTLSVKAD

SEQ ID NO: 1216 - protein, 107 aa, Artificial Sequence
  CD80 v513 IgV
VIHVTKEVKEVATLSCGVNVSVEELPQTRIYWQKDKKMVLTMMSGDLNIWPEYKNRTIFDITNNLSIMILGLRPSDEGTYECVVLKYEKDAFKREHLAEVTLSVKAD

SEQ ID NO: 1217 - protein, 107 aa, Artificial Sequence
  CD80 v514 IgV
VIHVTKEVKEVATLSCGVNVSVEELAQTRIYWQKDKKMVLTMMSGDVNIWPEYKNRTIFDITNNLSIMILGLRPSDEGTYECVVLKYEKGAFKREHLAEVTLSVKAD

SEQ ID NO: 1218 - protein, 107 aa, Artificial Sequence
  CD80 v515 IgV
VIHVTKEVKEVATLSCGYNVSVEELPQTRIYWQKDKKMVLTMMSGDINIWPEYKNRTIFDITNNLSIMILGLRPSDEGTYECVVLKYEKDAFKREHLAEVTLSVKAD

SEQ ID NO: 1219 - protein, 107 aa, Artificial Sequence
  CD80 v516 IgV
VIHVTKEVKEVATLSCGYNVSVEELPQTRIYWQKDKKMVLTMMSGDVNIWPEYKNRTIFDITNNLSIMILGLRPSDEGTYECVVLKYEKDAFKREHLAEVTLSVKAD

SEQ ID NO: 1220 - protein, 107 aa, Artificial Sequence
  CD80 v517 IgV
VIHVTKEVKEVATLSCGYNVSVEELAQTRIYWQKDKKMVLTMMSGDVNIWPEYKNRTIFDITNNLSILILGLRPSDEGTYECVVLKYEKGAFKREHLAEVTLSVKAD

SEQ ID NO: 1221 - protein, 107 aa, Artificial Sequence
  CD80 v518 IgV
VIHVTKEVKEVATLSCGYNVSVEELAQTRIYWQKDKKMVLTMMSGDVNIWPEYKNRTIFDITNNLSIMILGLRPSDEGTYECVVLKYEKGAFKREHLAEVTLSVKAD

SEQ ID NO: 1222 - protein, 107 aa, Artificial Sequence
  CD80 v519 IgV
VIHVTKEVKEVATLSCGHNVSVEELPQTRIYWQKDKKMVLTMMSGDINIWPEYKNRTIFDITNNLSIMILGLRPSDEGTYECVVLKYEKGAFKREHLAEVTLSVKAD

SEQ ID NO: 1223 - protein, 107 aa, Artificial Sequence
  CD80 v520 IgV
VIHVTKEVKEVATLSCGVNVSVEELGQTRIYWQKDKKMVLTMMSGDVNIWPEYKNRTIFDITNNLSIMILGLRPSDEGTYECVVLKYEKGAFKREHLAEVTLSVKAD

SEQ ID NO: 1224 - protein, 107 aa, Artificial Sequence
  CD80 v521 IgV
VIHVTKEVKEVATLSCGVNVSVEELSQTRIYWQKDKKMVLTMMSGDLNIWPEYKNRTIFDITNNLSIMILGLRPSDEGTYECVVLKYEKGAFKREHLAEVTLSVKAD

SEQ ID NO: 1225 - protein, 107 aa, Artificial Sequence
  CD80 v522 IgV
VIHVTKEVKEVATLSCGVNVSVEELRQTRIYWQKDKKMVLTMMSGDLNIWPEYKNRTIFDITNNLSIMILGLRPSDEGTYECVVLKYEKGAFKREHLAEVTLSVKAD

SEQ ID NO: 1226 - protein, 107 aa, Artificial Sequence
  CD80 v523 IgV
VIHVTKEVKEVATLSCGVNVSVEELDQTRIYWQKDKKMVLTMMSGDVNIWPEYKNRTIFDITNNLSIMILGLRPSDEGTYECVVLKYEKGAFKREHLAEVTLSVKAD

SEQ ID NO: 1227 - protein, 107 aa, Artificial Sequence
  CD80 v524 IgV
VIHVTKEVKEVATLSCGVNVSVEELQQTRIYWQKDKKMVLTMMSGDVNIWPEYKNRTIFDITNNLSILILGLRPSDEGTYECVVLKYEKGAFKREHLAEVTLSVKAD

SEQ ID NO: 1228 - protein, 107 aa, Artificial Sequence
  CD80 v525 IgV
VIHVTKEVKEVATLSCGANVSVEELPQTRIYWQKDKKMVLTMMSGDLNIWPEYKNRTIFDITNNLSIMILGLRPSDEGTYECVVLKYEKGAFKREHLAEVTLSVKAD

SEQ ID NO: 1229 - protein, 107 aa, Artificial Sequence
  CD80 v526 IgV
VIHVTKEVKEVATLSCGANVSVEELNQTRIYWQKDKKMVLTMMSGDLNIWPEYKNRTIFDITNNLSIMILGLRPSDEGTYECVVLKYEKGAFKREHLAEVTLSVKAD

SEQ ID NO: 1230 - protein, 107 aa, Artificial Sequence
  CD80 v527 IgV
VIHVTKEVKEVATLSCGFNVSVEELPQTRIYWQKDKKMVLTMMSGDINIWPEYKNRTIFDITNNLSIMILGLRPSDEGTYECVVLKYEKGAFKREHLAEVTLSVKAD

SEQ ID NO: 1231 - protein, 107 aa, Artificial Sequence
  CD80 v528 IgV
VIHVTKEVKEVATLSCGFNVSVEELHQTRIYWQKDKKMVLTMMSGDLNIWPEYKNRTIFDITNNLSIMILGLRPSDEGTYECVVLKYEKGAFKREHLAEVTLSVKAD

SEQ ID NO: 1232 - protein, 107 aa, Artificial Sequence
  CD80 v529 IgV
VIHVTKEVKEVATLSCGFNVSVEELNQTRIYWQKDKKMVLTMMSGDVNIWPEYKNRTIFDITNNLSIMILGLRPSDEGTYECVVLKYEKKAFKREHLAEVTLSVKAD

SEQ ID NO: 1233 - protein, 107 aa, Artificial Sequence
  CD80 v530 IgV
VIHVTKEVKEVATLSCGYNVSVEELNQTRIYWQKDKKMVLTMMSGDFNIWPEYKNRTIFDITNNLSIMILGLRPSDEGTYECVVLKYEKGAFKREHLAEVTLSVKAD

SEQ ID NO: 1234 - protein, 107 aa, Artificial Sequence
  CD80 v531 IgV
VIHVTKEVKEVATLSCGYNVSVEELPQTRIYWQKDKKMVLTMMSGDYNIWPEYKNRTIFDITNNLSIIILGLRPSDEGTYECVVLKYEKGAFKREHLAEVTLSVKAD

SEQ ID NO: 1235 - protein, 107 aa, Artificial Sequence
  CD80 v532 IgV
VIHVTKEVKEVATLSCGYNVSVEELQQTRIYWQKDKKMVLTMMSGDTNIWPEYKNRTIFDITNNLSIMILGLRPSDEGTYECVVLKYEKGAFKREHLAEVTLSVKAD

SEQ ID NO: 1236 - protein, 107 aa, Artificial Sequence
  CD80 v533 IgV
VIHVTKEVKEVATLSCGRNVSVEELPQTRIYWQKDKKMVLTMMSGNVNIWPEYKNRTIFDITNNLSIMILGLRPSDEGTYECVVLKYEKPAFKREHLAEVTLSVKAD

SEQ ID NO: 1237 - protein, 107 aa, Artificial Sequence
  CD80 v534 IgV
VIHVTKEVKEVATLSCGFNVSVEELDQTRIYWQKDKKMVLTMMSGETNIWPEYKNRTIFDITNNLSIMILGLRPSDEGTYECVVLKYEKGAFKREHLAEVTLSVKAD

SEQ ID NO: 1238 - protein, 440 aa, Artificial Sequence
  CD80 ECD-Fc
VIHVTKEVKEVATLSCGHNVSVEELAQTRIYWQKEKKMVLTMMSGDMNIWPEYKNRTIFDITNNLSIVILALRPSDEGTYECVVLKYEKDAFKREHLAEVTLSVKADFPTPSISDFEIPTSNIRRIICSTSGGFPEPHLSWLENGEELNAINTTVSQDPETELYAVSSKLDFNMTTNHSFMCLIKYGHLRVNQTFNWNTTKQEHFPDNEPKSSDKTHTCPPCPAPELLGGPSVFLFPPKPKDTLMISRTPEVTCVVVDVSHEDPEVKFNWYVDGVEVHNAKTKPREEQYNSTYRVVSVLTVLHQDWLNGKEYKCKVSNKALPAPIEKTISKAKGQPREPQVYTLPPSRDELTKNQVSLTCLVKGFYPSDIAVEWESNGQPENNYKTTPPVLDSDGSFFLYSKLTVDKSRWQQGNVFSCSVMHEALHNHYTQKSLSLSPGK

SEQ ID NO: 1239 - protein, 440 aa, Artificial Sequence
  CD80 ECD-Fc
VIHVTKEVKEVATLSCGHNVSVEELAQTRIYWQKEKKMVLTMMSGDMNIWPEYKNRTIFDITNNLSIVILALRPSDEGTYECVVLKYEKDAFKREHLAEVTLSVKADFPTPSISDFEIPTSNIRRIICSTSGGFPEPHLSWLENGEELNAINTTVSQDPETELYAVSSKLDFNMTTNHSFMCLIKYGHLRVNQTFNWNTTKQEHFPDNEPKSSDKTHTCPPCPAPEFEGGPSVFLFPPKPKDTLMISRTPEVTCVVVDVSHEDPEVKFNWYVDGVEVHNAKTKPREEQYNSTYRVVSVLTVLHQDWLNGKEYKCKVSNKALPASIEKTISKAKGQPREPQVYTLPPSRDELTKNQVSLTCLVKGFYPSDIAVEWESNGQPENNYKTTPPVLDSDGSFFLYSKLTVDKSRWQQGNVFSCSVMHEALHNHYTQKSLSLSPGK

SEQ ID NO: 1240 - protein, 225 aa, Artificial Sequence
  Fc1.1 delta EPKSSD
KTHTCPPCPAPEAEGAPSVFLFPPKPKDTLMISRTPEVTCVVVDVSHEDPEVKFNWYVDGVEVHNAKTKPREEQYNSTYRVVSVLTVLHQDWLNGKEYKCKVSNKALPAPIEKTISKAKGQPREPQVYTLPPSREEMTKNQVSLTCLVKGFYPSDIAVEWESNGQPENNYKTTPPVLDSDGSFFLYSKLTVDKSRWQQGNVFSCSVMHEALHNHYTQKSLSLSPG

SEQ ID NO: 1241 - protein, 5 aa, Artificial Sequence
  EAAAK linker
EAAAK

SEQ ID NO: 1242 - protein, 15 aa, Artificial Sequence
  (EAAAK)3 linker
EAAAKEAAAKEAAAK

SEQ ID NO: 1243 - protein, 17 aa, Artificial Sequence
  GS(G4S)3 linker
GSGGGGSGGGGSGGGGS

SEQ ID NO: 1244 - protein, 27 aa, Artificial Sequence
  GS(G4S)5 linker
GSGGGGSGGGGSGGGGSGGGGSGGGGS

SEQ ID NO: 1245 - protein, 104 aa, Artificial Sequence
  CD80 WT IgV
VIHVTKEVKEVATLSCGHNVSVEELAQTRIYWQKEKKMVLTMMSGDMNIWPEYKNRTIFDITNNLSIVILALRPSDEGTYECVVLKYEKDAFKREHLAEVTLSV

SEQ ID NO: 1246 - protein, 107 aa, Artificial Sequence
  CD80 WT IgV
VIHVTKEVKEVATLSCGHNVSVEELAQTRIYWQKEKKMVLTMMSGDMNIWPEYKNRTIFDITNNLSIVIQALRPSDEGTYECVVLKYEKDGFKREHLAEVTLSVKAD

SEQ ID NO: 1247 - protein, 22 aa, Artificial Sequence
  P2A protein
GSGATNFSLLKQAGDVEENPGP

SEQ ID NO: 1248 - protein, 237 aa, Artificial Sequence
  eGFP
SKGEELFTGVVPILVELDGDVNGHKFSVSGEGEGDATYGKLTLKFICTTGKLPVPWPTLVTTLTYGVQCFSRYPDHMKQHDFFKSAMPEGYVQERTIFFKDDGNYKTRAEVKFEGDTLVNRIELKGIDFKEDGNILGHKLEYNYNSHNVYIMADKQKNGIKVNFKIRHNIEDGSVQLADHYQQNTPIGDGPVLLPDNHYLSTQSALSKDPNEKRDHMVLLEFVTAAGITHGMDELYK

SEQ ID NO: 1249 - protein, 237 aa, Artificial Sequence
  Green fluorescent protein
SKGEELFTGVVPILVELDGDVNGHKFSVSGEGEGDATYGKLTLKFICTTGKLPVPWPTLVTTFSYGVQCFSRYPDHMKQHDFFKSAMPEGYVQERTIFFKDDGNYKTRAEVKFEGDTLVNRIELKGIDFKEDGNILGHKLEYNYNSHNVYIMADKQKNGIKVNFKIRHNIEDGSVQLADHYQQNTPIGDGPVLLPDNHYLSTQSALSKDPNEKRDHMVLLEFVTAAGITHGMDELYK

SEQ ID NO: 1250 - protein, 239 aa, Artificial Sequence
  eGFP
MVSKGEELFTGVVPILVELDGDVNGHKFSVSGEGEGDATYGKLTLKFICTTGKLPVPWPTLVTTLTYGVQCFSRYPDHMKQHDFFKSAMPEGYVQERTIFFKDDGNYKTRAEVKFEGDTLVNRIELKGIDFKEDGNILGHKLEYNYNSHNVYIMADKQKNGIKVNFKIRHNIEDGSVQLADHYQQNTPIGDGPVLLPDNHYLSTQSALSKDPNEKRDHMVLLEFVTAAGITLGMDELYK

SEQ ID NO: 1251 - protein, 25 aa, Artificial Sequence
  (EAAAK)5 linker
EAAAKEAAAKEAAAKEAAAKEAAAK

SEQ ID NO: 1252 - protein, 8 aa, Artificial Sequence
  FLAG-tag
DYKDDDDK

SEQ ID NO: 1253 - protein, 6 aa, Artificial Sequence
  6xHis tag
HHHHHH

SEQ ID NO: 1254 - protein, 228 aa, Artificial Sequence
  rabbit Fc
APSTCSKPTCPPPELLGGPSVFIFPPKPKDTLMISRTPEVTCVVVDVSEDDPEVQFTWYINNEQVRTARPPLREQQFNSTIRVVSTLPIAHEDWLRGKEFKCKVHNKALPAPIEKTISKARGQPLEPKVYTMGPPREELSSRSVSLTCMINGFYPSDISVEWEKNGKAEDNYKTTPAVLDSDGSYFLYSKLSVPTSEWQRGDVFTCSVMHEALHNHYTQKSISRSPGK

SEQ ID NO: 1255 - protein, 238 aa, Artificial Sequence
  mouse Fc2b
EPSGPISTINPCPPCKECHKCPAPNLEGGPSVFIFPPNIKDVLMISLTPKVTCVVVDVSEDDPDVQISWFVNNVEVHTAQTQTHREDYNSTIRVVSTLPIQHQDWMSGKEFKCKVNNKDLPSPIERTISKIKGLVRAPQVYILPPPAEQLSRKDVSLTCLVVGFNPGDISVEWTSNGHTEENYKDTAPVLDSDGSYFIYSKLNMKTSKWEKTDSFSCNVRHEGLKNYYLKKTISRSPG

SEQ ID NO: 1256 - protein, 101 aa, Artificial Sequence
  CD80 v1 IgV
VIHVTKEVKEVATLSCGHNVSVEELAQTRIYWQKEKKMVLTMMSGDMNIWPEYKNRTIFDITNNLSIVIQALRPSDEGTYECVVLKYEKDGFKREHLAEVT

SEQ ID NO: 1257 - protein, 101 aa, Artificial Sequence
  CD80 v20 IgV
VIHVTKEVKEVATLSCGHNVSVEELAQTRIYWQKEKKMVLTMMSGDMNIWPEYKNRTIFDITNNLSIVILALRPSDEGTYECVVLKYEKDGFKREHLAEVT

SEQ ID NO: 1258 - protein, 101 aa, Artificial Sequence
  CD80 v6 IgV
VIHVTKEVKEVATLSCGHNLSVEELAQTRIYWQKEKKMVLTMMSGDMNIWPEYKNRTIFDITNNLSIVIQALRPSDEGTYECVVLKYEKDSFKREHLAEVT

SEQ ID NO: 1259 - protein, 101 aa, Artificial Sequence
  CD80 v7 IgV
VIHVTKEVKEVATLSCGHNVSVEELAQTRIYWQKEKKMVLTMMPGDMNIWPEYKNRTIFDITNNLSIVIQALRPSDEGTYECVVLKYEKDGFKREHLAEVT

SEQ ID NO: 1260 - protein, 101 aa, Artificial Sequence; identical to SEQ ID NO: 1257
  CD80 v9 IgV

SEQ ID NO: 1261 - protein, 101 aa, Artificial Sequence
  CD80 v10 IgV
VIHVTKEVKEVATLSCGHNVSVEELAQTRIYWQKEKKMVLTMMSGDMNIWPEYKNRTIFDITNNLSIVIRALRPSDEGTYECVVLKYEKDGFKREHLAEVT

SEQ ID NO: 1262 - protein, 101 aa, Artificial Sequence
  CD80 v11 IgV
VIHVTKEVKEVATLSCGHNVSVEELAQTRIYWQKEKKMVLTMMSGDMNIWPEYKNRTIFDITNNLSIVIQALRPSDEGTYACVVLKYEKDGFKREHLAEVT

SEQ ID NO: 1263 - protein, 101 aa, Artificial Sequence
  CD80 v12 IgV
VIHVTKEVKEVATLSCGHNVSVEELAQTRIYWQKEKKMVLTMMSGDMNIWPEYKNRTIFDITNNLSIVIQALRPSDEGTYECVVLKNEKDGFKREHLAEVT

SEQ ID NO: 1264 - protein, 101 aa, Artificial Sequence
  CD80 v13 IgV
VIHVTKEVKEVATLSCGHNVSVEELAQSRIYWQKEKKMVLTMMSGDMNIWPEYKNRTIFDITNNLSIVIQALRPSDEGTYECVVLKYEKDGFKRKHLAEVT

SEQ ID NO: 1265 - protein, 101 aa, Artificial Sequence
  CD80 v14 IgV
VIHVTKEVKEVATLSCGHNVSVEELAQTRIYWQKEKKMVLTMMSGDMNIWPEYKNRTIFDITSNLSIVIQALRPSDEGTYECVVLKYEKDGFKREHLAEVT

SEQ ID NO: 1266 - protein, 101 aa, Artificial Sequence
  CD80 v15 IgV
VIHVTKEVKEVATLSCGHNVSVEELAQTRIYWQKEEKMVLTMMSGDMNIWPEYKNRTIFDITNNLSTVIQALRPSDEGTYECVVLKYEKDGFKREHLAEVT

SEQ ID NO: 1267 - protein, 101 aa, Artificial Sequence
  CD80 v16 IgV
VIHVTKEVKEVATLSCGHNVSVEELAQTRIYWQKEKKMVLTMMSGDMNIWPGYKNRTIFDITNNLSIVIQALRPSDEGTYECVVLKYEKDGFKREHLAEVT

SEQ ID NO: 1268 - protein, 101 aa, Artificial Sequence
  CD80 v17 IgV
VIHVTKEVKEVATLSCGHNVSVEELAQTRIYWQKEKEMVLTMMSGDMNIWPEYKNRTISDITNNLSIVIQALRPSDEGTYECVVLKYEKDGFKREHLAEVT

SEQ ID NO: 1269 - protein, 101 aa, Artificial Sequence
  CD80 v19 IgV
VIHVTKEVKEVATLSCGHNVSVEELAQTRIYWQKEKKMVLTMMSGDMNIWPEYKNRTIFDITNNLSIVILALRPSDEGTYECVVLKYEEDAFKREHLAEVT

SEQ ID NO: 1270 - protein, 101 aa, Artificial Sequence
  CD80 v21 IgV
VIHVTKEVKEVATLSCGHNVSVEELAQTRIYWQKEKKMVLTMMSGDMNIWPEYKNRTIFVITNNLSIVILALRPSDEGTYECVVLKYEKDGFKREHLAEVT

SEQ ID NO: 1271 - protein, 101 aa, Artificial Sequence
  CD80 v22 IgV
VIHVTKEVKEVATLSCGHNVSVEELAQTRIYWQKEKKMVLTMMSGDMNIWPEYMNRTIFDITNNLSIVILALRPSDEGTYECVVLKYEKDGFKREHLAEVT

SEQ ID NO: 1272 - protein, 101 aa, Artificial Sequence
  CD80 v23 IgV
VIHVTKEVKEVATLSCGHNVSVEELAQTRIYWQKEKKTVLTMMSGDMNIWPEYKNRTIFDITNNLSIVIQALRPSDGGTYECVVLKYEKDGFKREHLAEVT

SEQ ID NO: 1273 - protein, 101 aa, Artificial Sequence
  CD80 v24 IgV
VIHVTKEVKEVATLSCGHNVSVEELAQTHIYWQKEKKMVLTMMSGDMNIWPGYKNRTIFDITNNLSIVIRALRPSDEGTYECVVLKYGKDGFKREHLAEVT

SEQ ID NO: 1274 - protein, 101 aa, Artificial Sequence
  CD80 v25 IgV
VIHVTKEVKEVATLSCGHNVSVEELAQTRIHWQKEKKMVLGMMSGDMNIWPEYKNRTIFDITNNLSIVIQALRPSDEGTYECVVLKYEKDGFKREHLAEVT

SEQ ID NO: 1275 - protein, 101 aa, Artificial Sequence
  CD80 v26 IgV
VIHVTKEVKEVATLSCGHNVSVEELAQTRIYWQKEKKMVLTMMSGDMNIWPEYKNRTIFDITNNLSIAILALRPSDEGTYECVVLKYEKDAFKREHLAEVT

SEQ ID NO: 1276 - protein, 101 aa, Artificial Sequence
  CD80 v27 IgV
VIHVTKEVKEVATLSCGHNVSVEELAQTRIYWQKEKKMVLTMMSGDMNIWPEYKNRTIFDITNNLHIVILALRPSDEGTYECVVLKYEKGAFKREHLAEVT

SEQ ID NO: 1277 - protein, 101 aa, Artificial Sequence
  CD80 v28 IgV
VIHVTKEVKEVATLSCGHNVSVEELAQTHIYWQKEKKMVLTMMSGDMNIWPGYKNRTIFDITNNLSIVILALRPSDEGTYECVVLKYEKDAFKREHLAEVT

SEQ ID NO: 1278 - protein, 101 aa, Artificial Sequence
  CD80 v30 IgV
VIHVTKEVKEVATLSCGHNVSVEELAQTRIYWQKEKKMVLTMMSGDMNIWPEYKNRTIFDITNNLSTVIQALRPSDEGTYECVVLKYEKDGFKREHLAEVT

SEQ ID NO: 1279 - protein, 101 aa, Artificial Sequence
  CD80 v32 IgV
VIHVTKEVKEVATLSCGHNVSVEELAQTRIYWQKEKKVVLDMISGDMNIGPEYKNRTIFDITNNLSIVILALRPSGEGTYECAVLKYEEDAFKREHLAEVT

SEQ ID NO: 1280 - protein, 101 aa, Artificial Sequence
  CD80 v33 IgV
VIHVTKEVKEVATLSCGHNVSAEELAQTRIYWQKEKKMVLTMMSGDMNIWPEYKNRTIFDITNNLSIVIQALRPSDEGTYECVVLKYEKDAFKREHLAEVT

SEQ ID NO: 1281 - protein, 101 aa, Artificial Sequence
  CD80 v34 IgV
VIHVTKEVKEVVTLFCGHNVSVEELAQTRIHWQKEKKMVLGMMSGDMNIWPEYKNRTIFDITNNLSIVILALRPSDEGTYECVVLKYEKDAFKREHLAEVT

SEQ ID NO: 1282 - protein, 101 aa, Artificial Sequence
  CD80 v35 IgV
VIHVTKEVKEVATLSCGHNVSVEELAQTRIYWQKEKKMVLTMMSGDMNIWPEYKNRTIFDITNNLSFVIRALRPSDEGTYECVVLKYGKDGFKREHLAEVT

SEQ ID NO: 1283 - protein, 101 aa, Artificial Sequence
  CD80 v36 IgV
VIHVTKEVKEVATLSCGHNVSVEGPAQTRIYWQKEKKMVLTMMSGDMNIWPEYKNRTIFDITNNLSIVIQALRPSDEGTYECVVLKYEKDAFKREHLAEVT

SEQ ID NO: 1284 - protein, 101 aa, Artificial Sequence
  CD80 v37 IgV
VIHVTKEVKEVATLSCGHNVSVEELAQTRIYWQKEKKMVLTMMSGDMNIWPEYKNRTIFDITNNLSIVILALRPSDEGTYECVVLKYEKDGLKREHLAEVT

SEQ ID NO: 1285 - protein, 101 aa, Artificial Sequence
  CD80 v38 IgV
VIHVTKEVKEVATLSCGHNVSVEELAQTDILWHKEGKIVLAMRSGDTNIWPEYKNRTIFDITNNLSIVILALRPSDEGTYVCVVRKYENDTPVLEHLAEVT

SEQ ID NO: 1286 - protein, 101 aa, Artificial Sequence
  CD80 v40 IgV
VIHVTKEVKEVATLSCGHNVSVEELAQTDILWHKEGKIVLATRSGDTNIWPEYKNRTIFDITNNLSIVILALRPSDEGTYVCVVRKYENDTPVLEHLAEVT

SEQ ID NO: 1287 - protein, 101 aa, Artificial Sequence
  CD80 v41 IgV
VIHVTKEVKEVATLSCGHNVSVEGLAQTDILWHKEGKIVLAMRSGDTNIWPEYKNRTILDITNNLSIVILALRPSDEGTYVCVVRKYENDTPVLERLAEVT

SEQ ID NO: 1288 - protein, 101 aa, Artificial Sequence
  CD80 v43 IgV
VIHVTKEVKEVATLSCGHNVSVEELAQTVIYWQKEKKMVLTMQSGDMNIWPEYKNRTIFDITNNLSIVILALRPSDEGTYRCVVIKYERLENQGEHLAEVT

SEQ ID NO: 1289 - protein, 101 aa, Artificial Sequence
  CD80 v44 IgV
VIHVTKEVKEVATLSCGHNVSVEELAQTRIYWQKEKKMVLIMMSGDMNIWPEYKNRTIFDITNNLSIVILALRPSDEGTYECVVLKYEKDGFKREHLAEVT

SEQ ID NO: 1290 - protein, 101 aa, Artificial Sequence
  CD80 v45 IgV
VIHVTKEVKEVATLSCGHNVSVEELAQTRIYWQKEKKMVLTMMSGDMNIWPEYKNRTIFDITNNLSIVILALRPSDEGTYECVVLKYERKGYRREHLAEVT

SEQ ID NO: 1291 - protein, 101 aa, Artificial Sequence
  CD80 v47 IgV
VIHVTKEVKEVATLSCGHNVSVEELAQTRIYWQKEGQIVLTMMSGDMNIWPEYKNRTILDITNNLSIVILALRPSDEGTYVCVVRKYENDTPVLEHLAGVT

SEQ ID NO: 1292 - protein, 101 aa, Artificial Sequence
  CD80 v48 IgV
VIHVTKEVKEVATLSCGHNVSVEELAQTRIYWQKEKKMVLTMMSGDMNIWPEYKNRTIFDITNNLSIVILALRPSDEGTYECVVLKYDRKGYRREHLAEVT

SEQ ID NO: 1293 - protein, 101 aa, Artificial Sequence
  CD80 v49 IgV
VIHVTKEVKEVATLSCGHNVSVEELAQTRIYWQKEGQIVMTMMSGDMNIWPEYKNRTIFDITNNLSIVILALRPSDEGTYECVVLKYEKDAFKREHLAEVT

SEQ ID NO: 1294 - protein, 101 aa, Artificial Sequence
  CD80 v50 IgV
VIHVTKEVKEVATLSCGHNVSVEELAQTRIYWQKEGKMVLTMMSGDMNIWPEYKNRTIFDITNNLSIVILALRPSDEGTYECVVLKYEKDAFKREHLAEVT

SEQ ID NO: 1295 - protein, 101 aa, Artificial Sequence
  CD80 v51 IgV
VIHVTKEVKEVATLSCGHNVSVEELAQTHIHWQKEKKMVLGMMSGDMNIWPEYKNRTIFDITNNLSIVILALRPSDEGTYECVVLKNGENGFKREHLAEVT

SEQ ID NO: 1296 - protein, 101 aa, Artificial Sequence
  CD80 v52 IgV
VIHVTKEVKEVTTLSCGLNVSVEELAQTRIYWQKEKKMVLTMVSGDMNIWPEYKNRTILDITNNLSIVILALRPSDKGTYECVVLKYEKDAFKREHLAEVT

SEQ ID NO: 1297 - protein, 101 aa, Artificial Sequence
  CD80 v53 IgV
VIHVTKEVKEVATLSCGHNVSVEELAQTVIFWQKEGKLVLTMQSGDMNIWPEYKNRTIFDITNNLSIVILALRPSDEGTYRCIVIKYERLENQGEHLAEVT

SEQ ID NO: 1298 - protein, 101 aa, Artificial Sequence
  CD80 v54 IgV
VIHVTKEVKEVATLSCGHNVSVEELAQTRIYWQKEKKMVLTMMSGDMNIWPEYKNRTIFDITNNLSIMIPAPRPSDEGTYECVVLEYEKDAFKREHLAEVT

SEQ ID NO: 1299 - protein, 208 aa, Artificial Sequence
  CD80 v55 ECD
VIHVTKEVKEVATLSCGHNVSVEELAQTDILWHKEGKIVLAMRSGDTNIWPEYKNRTIFDITNNLSIVILALRPSDEGTYVCVVRKYENDTPVLEHLAEVTLSVKADFPTPSISDFEIPSSNIRRITCSASGGFPEPHLSWLENGEELNAINTTVSQDPETELYAVSSELDFNMTTNHSFMCLIKYGHLRVNQTFNWNTTKQEHFPDN

SEQ ID NO: 1300 - protein, 208 aa, Artificial Sequence
  CD80 v56 ECD
VIHVTKEVKEVATLSCGHNVSVEELAQTDILWHKEGKIVLAMRSGDTNIWPEYKNRTIFDITNNLSIVIQALRPSDEGTYVCVVRKYENDTPVLEHLAEVTLSVKADFPTPSISDFEIPSSNIRRITCSASGGFPEPHLSWLENGEELNAINTTVSQDPETELYAVSSKLDFNMTTNHSFMCLIKYGHLRVNQTFNWNTTKQEHFPDN

SEQ ID NO: 1301 - protein, 208 aa, Artificial Sequence
  CD80 v57 ECD
VIHVTKEVKEVATLSCGLNVSVEELAQTDILWHKEGKIVLAMRSGDTNIWPEYKNRTIFDITNNLSIVILALRPSDEGTYVCVVRKYENDTPVLEHLAEVTLSVKADFPTPSISDFEIPSSNIRRITCSASGGFPEPHLSWLENGEELNAINTTVSQDPETELYAVSSELDFNMTTNHSFMCLIKYGHLRVNQTFNWNTTKQEHFPDN

SEQ ID NO: 1302 - protein, 208 aa, Artificial Sequence
  CD80 v58 ECD
VIHVTKEVKEVATLSCGHNVSVEELAQTDILWHKEGKIVLAMRSGDTNIWPEYKNRTIFDITNNLSIVILALRPSDEGTYVCRVLKYENDTPVLEHLAEVTLSVKADFPTPSISDFEIPSSNIRRIICSASGGFPEPHLSWLENGEELNAINTTVSQDPETELYAVSSKLDFNTTTNHSFMCLIKYGHLRVNQTFNWNTTKQEHFPDN

SEQ ID NO: 1303 - protein, 208 aa, Artificial Sequence
  CD80 v59 ECD
VIHVTKEVKEVATLSCGHNVSVEELAQTDILWHKEGKIVLAMRSGDTNIWPEYKNRTILDITNNLSIVILALRPSDEGTYVCVVRKYENDTPVLEHLAEVTLSVKADFPTPSISDFEIPSSNIRRITCSASGGFPEPHLSWLENGEELNAINTTVSQDPETELYAVSSKLDFNMTTNHSFMCLIKYGDLRVNQTFNWNTTKQEHFPDN

SEQ ID NO: 1304 - protein, 208 aa, Artificial Sequence
  CD80 v60 ECD
VIHVTKEVKEVATLSCGRNVSVEELAQTDILWHKEGEIVLAMRSGDTNIWPEYKNRTIFDITNNLSIVIQALRPSDEGTYVCVVRKYENDTPVLEHLAEVTLSVKADFPTPSISDFEIPSSNIRRIICSASGGFPEPHLSWLENGEELNAINTTVSQDPETELYAVSSELDFNMTTNHSFMCLIKYGDLRVNQTFNWNTTKQEHFPDN

SEQ ID NO: 1305 - protein, 208 aa, Artificial Sequence
  CD80 v61 ECD
VIHVTKEVKEVATLSCGHNVSVEELAQTDILWHKEGKIVLAMRSGDTNIWPEYKNRTIFDITNNLSIVIQALRPSDEGTYVCVVRKYENDTPVLEHLAEVTLSVKADFPTPSISDFEIPSSNIRRITCSASGGFPEPHLSWLGNGEELNAINTTVSQDPETELYAVSSELDFNVTTNHSFMCLIKYGDLRVNQTFNWNTTKQEHFPDN

SEQ ID NO: 1306 - protein, 208 aa, Artificial Sequence; identical to SEQ ID NO: 1300
  CD80 v62 ECD

SEQ ID NO: 1307 - protein, 208 aa, Artificial Sequence
  CD80 v63 ECD
VIHVTKEVKEVATLSCGHNVSVEELAQTDILWHKEGKIVLAMRSGDTNIWPEYKNRTIFDITNNLSIVILALRPSDEGTYVCVVRKYENDTPVLEHLAEVTLSVKADFPTPSISDFEIPSSNIRRITCSASGGFPEPHLSWLENGEELNAINTTVSQDPETELYAVSSKLDFNMTTNHSFMCLIKYGDLRVNQTFNWNTTKQEHFPDN

SEQ ID NO: 1308 - protein, 208 aa, Artificial Sequence
  CD80 v64 ECD
VIHVTKEVKEVATLSCGHNVSVEELAQTDILWHKEGKIVLAMRSGDTNIWPEYKNRTIFDITNNLSIVIQALRPSDEGTYVCVVRKYENDTPVLEHLAEVTLSVKADFPTPSISDFEIPSSNIRRITCSASGGFPEPHLSWLENGEELNAINTTVSQDPETELYAVSSELDFNMTTNHSFMCLIKYGHLRVNQTFNWNTTKQEHFPDN

SEQ ID NO: 1309 - protein, 208 aa, Artificial Sequence; identical to SEQ ID NO: 1300
  CD80 v65 ECD

SEQ ID NO: 1310 - protein, 208 aa, Artificial Sequence
  CD80 v66ECD
VIHVTKEVKEVATLSCGHNVSVEELAQTDILWHKEGKIVLAMRSGDTNIWPEYKNRTIFDITNNLSIVILALRPSDEGTYECVVRKYENDTPVLEHLAEVTLSVKADFPTPSISDFEIPSSNIRRITCSASGGFPEPHLSWLENGEELNAINTTVSQDPETELYAVSSELDFNMTTNHSFMCLIKYGDLRVNQTFNWNTTKQEHFPDN

SEQ ID NO: 1311 - protein, 208 aa, Artificial Sequence
  CD80 v67 ECD
VIHVTKEVKEVATLSCGHNVSVEELAQTDILWHKEGKIVLAMRSGDTNIWPEYKNRTIFDITNNLSIVILALRPSDEGTYVCVVRKYENDTPVLEHLAEVTLSVKADLPTPSISDFEIPSSNIRRIICSASGGFPEPHLSWLENGEELNAINTTVSQDPETELYAVSSELDFNMTTNHSFMCLIKYGDLRVNQTFNWNTTKQEHFPDN

SEQ ID NO: 1312 - protein, 208 aa, Artificial Sequence
  CD80 v68 ECD
VIHVTKEVKEVATLSCGHNVSVEELAQTDILWHKEGKIVLAMRSGDTNIWPEYKNRTIFDITNNLSIVIQALRPSDEGTYVCVVRKYENDTPVLEHLAEVTLSVKADFPTPSISDFEIPTSNIRRIICSASGGFPEPHLSWLENGEELNAINTTVSQDPETELYAVSSKLDFNMTTNHSFMCLIKYGDLRVNQTFNWNTTKQEHFPDN

SEQ ID NO: 1313 - protein, 208 aa, Artificial Sequence; identical to SEQ ID NO: 1308
  CD80 v69 ECD

SEQ ID NO: 1314 - protein, 208 aa, Artificial Sequence
  CD80 v70 ECD
VIHVTKEVKEVATLSCGLNVSVEELAQTDILWHKEGKIVLAMRSGDTNIWPEYKNRTIFDITNNLSIVIQALRPSDEGTYVCVVRKYENDTPVLEHLAEVTLSVKADFPTPSISDFEIPSSNIRRIICSASGGFPEPHLSWLENGEELNAINTTVSQDPETELYAVSSELDFNMTTNHSFMCLIKYGDLRVNQTFNWNTTKQEHFPDN

SEQ ID NO: 1315 - protein, 208 aa, Artificial Sequence
  CD80 v71 ECD
VIHVTKEVKEVATLSCGHNVSVEELAQTDILWHKEGKIVLAMRSGDTNIWPEYKNRTIFDITNNLSIVILALRPSDEGTYVCVVRKYENDTPVLEHLAEVTLSVKADFPTPSISDFEIPSSNIRRITYSASGGFPEPHLSWLENGEELNAINTTVSQDPETELYAVSSKLDFNMTTNHSFMCLIKYGDLRVNQTFNWNTTKQEHFPDN

SEQ ID NO: 1316 - protein, 208 aa, Artificial Sequence
  CD80 v72 ECD
VIHVTKEVKEVATLSCGHNVSVEELAQTDILWHKEGKIVLAMRSGDTNIWPEYKNRTIFDITNNLSIVILALRPSDEGTYVCVVRKYENDTPVFEHLAEVTLSVKADFPTPSISDFEIPTSNIRRIICSASGGFPEPHLSWLENGEELNAINTTVSQDPETELYAVSSELDFNMTTNHSFMCLIKYGHLRVNQTFNWNTTKQEHFPDN

SEQ ID NO: 1317 - protein, 208 aa, Artificial Sequence
  CD80 v73 ECD
VIHVTKEVKEVATLSCGLNVSVEELAQTDILWHKEGKIVLAMRSGDTNIWPEYKNRTIFDITNNLSIVILALRPSDEGTYVCVVRKYENDTPVLEHLAEVTLSVKADFPTPSISDFEIPTSNIRRIICSASGGFPEPHLSWLENGEELNAINTTVSQDPETELYAVSSKLDFNMTTNHSFMCLIKYGHLRVNQTFNWNTTKQEHFPDN

SEQ ID NO: 1318 - protein, 208 aa, Artificial Sequence
  CD80 v74 ECD
VIHVTKEVKEVATLSCGLNVSVEELAQTDILWHKEGKIVLAMRSGDTNIWPEYKNRTIFDITNNLSIVIQALRPSDEGTYVCVVRKYENDTPVLEHLAEVTLSVKADFPTPSISDFEIPSSNIRRIICSASGGFPEPHLSWLENGEELNAINTTVSQDPETELYAVSSELDFNMTTNHSFMCLIKYGHLRVNQTFNWNTTKQEHFPDN

SEQ ID NO: 1319 - protein, 208 aa, Artificial Sequence
  CD80 v75 ECD
VIHVTKEVKEVATLSCGHNVSVEELAQTDILWHKEGKIVLAMRSGDTNIWPEYKNRTIFDITNNLSIVIQALRPSDEGTYVCVVRKYENDTPILEHRAEVTLSVKADFPTPSISDFEIPTSNIRRIICSASGGFPEPHLSWLENGEELNAINTTVSQDPETELYAVSSKLDFNMTTNHSFMCLIKYGHLRVNQTFNWNTTKQEHFPDN

SEQ ID NO: 1320 - protein, 208 aa, Artificial Sequence
  CD80 v76 ECD
VIHVTKEVKEVATLSCGHNVSVEELAQTDILWHKEGKIVLAMRSGDTNIWPEYKNRTIFDITNNLSIVIQALRPSDEGTYVCVVRKYENDTPILEHRAEVTLSVKADFPTPSISDFEIPTSNIRRIICSASGGFPEPHLSWLENGEESNAINTTVSQDPETELYAVSSKLDFNMTTNHSFMCLIKYGHLRVNQTFNWNTTKQEHFPDN

SEQ ID NO: 1321 - protein, 208 aa, Artificial Sequence
  CD80 v77 ECD
VIHVTKEVKEVATLSCGLNVSVEELAQTDILWHKEGKIVLAMRSGDTNIWPEYKNRTIFDITNNLSIVILALRPSDEGTYVCVVRKYENDTPVLEHLAEVTLSVKADFPTPSISDFEVPSSNIRRITCSASGGFPEPHLSWLENGEELNAINTTVSQDPETELYAVSSELDFNMTTNHSFMCLIKYGHLRVNQTFNWNTTKQEHFPDN

SEQ ID NO: 1322 - protein, 208 aa, Artificial Sequence
  CD80 v78 ECD
VIHVTKEVKEVATLSCGHNVSVEELAQTDILWHKEGKIVLAMRSGDTNIWPEYKNRTIFDNTNNLSIVILALRPSDEGTYVCVVRKYENDTPVFEHLAEVTLSAKADFPTPSISDFEIPSSNIRRIICSASGGFPEPHLSWLENGEELNAINTTVSQDPETELYAVSSKLDFNMTTNHSFMCLIKYGHLRVNQTFNWNTTKQEHFPDN

SEQ ID NO: 1323 - protein, 208 aa, Artificial Sequence
  CD80 v79 ECD
VIHVTKEVKEVATLSCGHNVSVEELAQTDILWHKEGKIVLAMRSGDTNIWPEYKNRTIFDITNNLSIVILALRPSDEGTYVCVVRKYENDAPVFEHLAEVTLSVKADFPTPSISDFEVPTSNIRRIICSASGGFPEPHLSWLENGEELNAINTTVSQDPETELYAVSSKLDFNMTTNHSFMCLIKYGHLRVNQTFNWNTTKQEHFPDN

SEQ ID NO: 1324 - protein, 208 aa, Artificial Sequence
  CD80 v80 ECD
VIHVTKEVKEVATLSCGHNVSVEELAQTDILWHKEGKIVLAMRSGDTNIWPEYKNRTIFDISNNLSIVILALRPSDEGTYVCVVRKYENDTPVLEHLAEVTLSVKADFPTPSISDFEVPSSNIRRIICSASGGFPEPHLSWLENGEELNAINTTVSQDPETELYAVSSELDFNMATNHSFMCLIKYGHLRVNQTFNWNTTKQEHFPDN

SEQ ID NO: 1325 - protein, 208 aa, Artificial Sequence
  CD80 v81 ECD
VIHVTKEVKEVATLSCGLNVSVEELAQTDILWHKEGKIVLAMRSGDTNIWPEYKNRTIFDITNNLSIVILALRPSDEGTYVCVVRKYENDTPVLEHLAEVTLSVKADFPTPSISDSEIPTSNIRRIICSASGGFPEPHLSWLENGEELNAINTTVSQDPETELYAVSSKLDFNMTTNHSFMCLIKYGDLRVNQTFNWNTTKQEHFPDN

SEQ ID NO: 1326 - protein, 208 aa, Artificial Sequence
  CD80 v82 ECD
VIHVTKEVKEVATLSCGLNVSVEELAQTDILWHKEGKIVLAMRSGDTNIWPEYKNRTIFDITNNLSIVILALRPSDEGTYVCVVRKYENDTPVLEHLAEVTLSVKADFPTPSISDFEIPSSNIRRITCSASGGFPEPHLSWSENGEELNAINTTVSQDPETELYAVSSKLDFNMTTNHSFMCLIKYGDLRVNQTFNWNTTKQEHFPDN

SEQ ID NO: 1327 - protein, 208 aa, Artificial Sequence
  CD80 v83 ECD
VIHVTKEVKEVATLSSGLNVSVEELAQTDILWHKEGKIVLAMRSGDTNIWPEYKNRTIFDITNNLSIVILALRPSDEGTYVCVVRKYENDTPVLEHLAEVTLSVKADFPAPSISDFEIPTSNIRRIICSTSGGFPEPHLSWLENGEELNAINTTVSQDPETELYAVSSKLDFNMTTNHSFMCLIKYGDLRVNQTFNWNTTKQEHFPDN

SEQ ID NO: 1328 - protein, 208 aa, Artificial Sequence
  CD80 v84 ECD
VIHVTKEVKEVATLSCGHNVSVEELAQTDILWHKEGKIVLAMRSGDTNIWPEYKNRTIFDITNNLSIVILALRPSDEGTYECVVLKYEKDGFKREHLAEVTLSVKADFPTPSISDFEIPSSNIRRITCSASGGFPEPHLSWLENGEELNAINTTVSQDPETELYAVSSKLDFNMTTNHSFMCLIKYGDLRVNQTFNWNTTKQEHFPDN

SEQ ID NO: 1329 - protein, 208 aa, Artificial Sequence
  CD80 v85 ECD
VIHVTKEVKEVATLSCGHNVSVEELAQTDILWHKEGKIVLAMRSGDTNIWPEYKNRTIFDITNNLSIVIQALRPSGEGTYECVVLKYEKDGFKREHLAEVTLLVKADFPTPSISDFEIPSSNIRRITCSASGGFPEPHLSWLENGEELNAINTTVSQDPETELYAVSSKLDFNMTTNHSFMCLIKYGHLRVNQTFNWNTTKQEHFPDN

SEQ ID NO: 1330 - protein, 207 aa, Artificial Sequence
  CD80 v86 ECD
VIHVTKEVKEVATLSCGHNVSVEELAQTRIYWKEKKMVLTMMSGDMNIWPECKNRTIFDITNNLSIVILALRPSDEGTYECVVRKYENDTPVLEHLAEVTLSVKADFPTPSISDFEIPSSNIRRITCSASGGFPEPHLSWLENGEELNAINTTVSQDPETELYAVSSELDFNMTTNHSFMCLIKYGHLRVNQTFNWNTTKQEHFPDN

SEQ ID NO: 1331 - protein, 208 aa, Artificial Sequence
  CD80 v87 ECD
VIHVTKEVKEVATLSCGHNVSVEELAQTRIYWQKEKKMVLTMMSGDMNIWPEYKNRTIFDISNNLSIVILALRPSDEGTYVCVVRKYENDTPVLEHLAEVTLSVKADFPTPSISDFEIPSSNIRRIICSASGGFPEPHLSWLENGEELNAINTTVSQDPETELYAVSSELDFNMTTNHSFMCLIKYGHLRVNQTFNWNTTKQEHFPDN

SEQ ID NO: 1332 - protein, 208 aa, Artificial Sequence
  CD80 v88 ECD
VIHVTKEVKEVATLSCGHNVSVEELAQTDILWHKEGKIVLAMRSGDTNIWPEYKNRTIFDITNNLSIVILALRPSDEGTYVCVVRKYENDTPVLEHLAEVTLSVKADFPTPSISDFEIPTSNIRRIICLTSGGFPEPHLSWLENGEELNAINTTVSQDPETELYAVSSKLDFNMTTNHSFMCLIKYGDLRVNQTFNWNTTKQEHFPDN

SEQ ID NO: 1333 - protein, 208 aa, Artificial Sequence
  CD80 v89 ECD
VIHVTKEVERSGNAVLWYNVSVEELAQTRIYWQKEKKMVLTMMSGDMNIWPECKNRTIFDITNNLSIVIQALRPSDEGTYECVVLKYEKGAFKREHLAEVTLSVKADFPTPSISDFEIPTSNIRRIICSASGGFPEPHLSWLENGEELDAITTTVSQDPETELYAVSSKLDFNMTTNHSFMCLIKYGDLRVNQTFNWNTTKQEHFPDN

SEQ ID NO: 1334 - protein, 208 aa, Artificial Sequence
  CD80 v90 ECD
VIHVTKEVKEVATLSCGLNVSVEELAQTDILWHKEGKMVLAMRSGDTNIWPEYKNRTIFDITNNLSIVILALRPSDEGTYVCVVRKYENDTPVLEHLAEVTLSVKADFPTPSISDFEVPSSNIRRITCSASGGFPEPHLSWLENGEELNAINTTVSQDPETELYAVSSKLDFNMTTNHSFMCLIKYGDLRVNQTFNWNTTKQEHFPDN

SEQ ID NO: 1335 - protein, 208 aa, Artificial Sequence
  CD80 v91 ECD
VIHVTKEVKEVATLSCGHNVSVEELAQTRIYWQKEKKMVLTMMSGDMNIWPEYKNRTIFDITNNLSIVILALRPSDEGTYECVVLKYEEDAFEREHLAEVTLSVKADFPTPSISDFEIPTSNIRRIICSASGGFPEPHLSWLENGEELNAINTTVSQDPETELYAVSSKLDFNMTTNHSFMCLIKYGHLRVNQTFNWNTTKQEHFPDN

SEQ ID NO: 1336 - protein, 208 aa, Artificial Sequence
  CD80 v92 ECD
VIHVTKEVKEVATLSCGHNVPVEELAQTDILWHKEGKIVLAMRSGDTIIWPEYKNRTIFDITNNLSIAILALRPSDEGTYVCVVRKYENDTPVLEHLAEVTLSVKADFHTPSISDFEIPTSNIRRLICSTSGGFPEPHLSWLENGEELNAINTTVSQDPETELYAVSSILDFNMTTNHSFMCLIKYGHLRVNQTFNWNTTKQEHFPDN

SEQ ID NO: 1337 - protein, 208 aa, Artificial Sequence
  CD80 v93 ECD
VIHVTKEVKEVATLSCGLNVSVEELAQTDILWHKEGKIVLAMRSGDTNIWPEYKNRTIFDITNNLSIVILALRLSDEGTNVCVVRKYENDTPVLEHRAEVTLSVKADFPTPSISDFEIPTSNIRRIICSTSGGFPEPHLSWLENGEELNAINTTVSQDPETELYAVSSKLDFNMTTNHSFMCLIKYGHLRVNQTFNWNTTKQEHFPDN

SEQ ID NO: 1338 - protein, 208 aa, Artificial Sequence
  CD80 v94 ECD
VIHVTKEVKEVATLSCGHNVPVEELAQTDILWHKEGKIVLAMRSGDTNIWPEYKNRTIFDITNNLSIVILALRLSDEGTNVCVVRKYENNTPVLEHLAEVTLSVKADFPTPSISDFEIPTSNIRRIICSASGGFPEPHLSWLENGEELSAINTTVSQDPETGLYAVSSKLDFNMTTNHSFMCLIKYGHLRVNQTFNWNTTKQEHFPDN

SEQ ID NO: 1339 - protein, 208 aa, Artificial Sequence
  CD80 v95 ECD
VIHVTKEVKEVATLSCGLNVSVEELAQTDILWHKEGKIVLAMRSGDTNIWPEYKNRTIFDITNNLSIMILALRPSDEGTYVCVVRKYENDTPVLEHLAEVTLSVKADFPTPSISDFEIPTSNIRRIICSASGGFPEPHLSWLENGEELNAINTTVSQDPETELYAVSSKLDFNMTTNHSFMCLIKYGHLRVNQTFNWNTTKQEHFPDN

SEQ ID NO: 1340 - protein, 208 aa, Artificial Sequence
  CD80 v96 ECD
VIHVTKEVKEVATLSCGHNVSVEELAQTDILWHKEGKIVLAMRSGDTNIWPEYKNRTIFDITNNLSIMILALRPSDEGTYVCVVRKYENDTPVLEHLAEVTLSVKADFPTPSISDFEIPTSNIRRIICSASGGFPEPHLSWLENGEELSAINTTVSQDPETELYAVSSKLDFNMTTNHSFMCLIKYGHLSVNQTFNWNTTKQEHFPDN

SEQ ID NO: 1341 - protein, 208 aa, Artificial Sequence
  CD80 v97 ECD
VIHVTKEVKEVATLSCGLNVSVEELAQTDILWHKEGKIVLAMRSGDTNIWPEYKNRTIFDITNNLSIVILALRLSDEGTNVCVVRKYENDTPVLEHLAEVTLSVKADFPTPSISDFEIPTSNIRRIICSASGGFPEPHLSWLENGEELNAINTTVSQDPETELYAVSSKLDFNMTTNHSFMCLIKYGHLSVNQTFNWNTTKQEHFPDN

SEQ ID NO: 1342 - protein, 208 aa, Artificial Sequence
  CD80 v98 ECD
VIHVTKEVKEVATLSGGHNVSAEELAQTDILWHKEGKIVLAMRSGDTNIWPEYKNRTIFDITNNLSIMILALRPSGEGTYVCVVRKYENDTPVLEHLAEVTLSVKADFPTPSISDFETPTSNIRRIICSASGGFPEPHLTWLENGEELSAINTTVSQDPETELYAVSSILDFNMTTNRSFMCLIKYGHLRVDQTFNWNTTKQEHFPDN

SEQ ID NO: 1343 - protein, 208 aa, Artificial Sequence
  CD80 v99 ECD
VIHVTKEVKEVATLSCGHNVSVEELAQTDILWHKEGKIVLAMRSGDTNIWPEYKNRTIFDITNNLSIVILALRPSDEGTYVCVVRKYENDTPVFEHLAEVTLSVKADFPTPSISDFVTPTSNIRRIICSTSGGFPEPHLSWLENGEELSAINTTVSQDPETELYAVSGKLDFNMTTNHSFMCLIKYGQLRVNQTFNWNTTKQEHFPDN

SEQ ID NO: 1344 - protein, 208 aa, Artificial Sequence
  CD80 v100 ECD
VIHVTKEVKEVATLSCGHNVSAEELAQTDILWHKEGKIVLAMRSGDTNIWPEYKNRTIFDITNNLSIMILALRPSDEGTYVCVVRKYENDTPVLEHLAEVTLSVKADFPTPSISDFEIPTSNIRRIICSASGGFPEPHLSWLENGEELNAINTTVSQDPETELYAVSSKLDFNMTTNHSFMCLIKYGHLRVNQTFNWNTTKQEHFPDN

SEQ ID NO: 1345 - protein, 208 aa, Artificial Sequence
  CD80 v101 ECD
VIHVTKEVKEVATLSCGHNVSVEELAQTDILWHKEGKIVLAMRSGDTNIWPEYKNRTIFDITNSLSIVILALRPSDEGTYVCVVRKYENDTPVFEHLAEVTLSVKADFPTPSISDFETPTSNIRRIICSASGGFPEPHLSWLENGEELSAINTTVSQDPETELYAVSSILDFNMTTNHSFMCLIKYGHLRVNQTFNWNTTKQEHFPDN

SEQ ID NO: 1346 - protein, 208 aa, Artificial Sequence
  CD80 v102 ECD
VIHVTKEVKEVATLSCGHNVSAEELAQTDILWHKEGKIVLAMRSGDTNIWPEYKNRTIFDITNNLSIMILALRPSDEGTYVCVVRKYENDTPVLEHLAEVTLSVKADFPTPSISGFETPTSNIRRIICSASGDFPEPHLSWLENGEELSAINTTVSQDPETELYAVSSKLDFNMTTNHSFMCLIKYGHLRVNQTFNWNTTKQEHFPDN

SEQ ID NO: 1347 - protein, 208 aa, Artificial Sequence
  CD80 v103 ECD
VIHVTKEVKEVATLSCGHNVSVEELAQTRIYWQKEKKMVLTMMSGDMNIWPEYKNRTIFDITNNLSIVILALRPSDEGTYECVVLKYEKDAFKREHLAEVTLSVKADFPTPSISDFEIPTSNIRRIICPTSGGFPEPHLSWLENGEELNAINTTVSQDPETELYAVSSKLDFNMTTNHSFMCLIKYGHLRVNQTFNWNTTKQEHFPDN

SEQ ID NO: 1348 - protein, 208 aa, Artificial Sequence
  CD80 v104 ECD
VIHVTKEVKEVATLSCGHNVSVEELAQTRIYWQKEKKMVLTMMSGDMNIWPEYKNRTIFDITNNLSIVILALRPSDEGTYECVVLKYEKDGFKREHLAEVTLSVKADFPTPSISDFEIPTSNIRRIICPTSGGFPEPHLSWLENGEELNAINTTVSQDPETELYAVSSKLDFNMTTNHSFMCLIKYGHLRVNQTFNWNTTKQEHFPDN

SEQ ID NO: 1349 - protein, 208 aa, Artificial Sequence
  CD80 v105 ECD
VIHVTKEVKEVATLSCGHNVSVEELAQTRIYWQKEKKMVLTMMSGDMNIWPEYKNRTIFDITNNLSIVTQALRPSDEGTYECVVLKYEKDGFKREHLAEVTLSVKADFPTPSISDFEIPSSNIRRIICSTSGGFPEPHLSWLENGEELNAINTTVSQDPETELYAVSSKLDFNMTTNHSFMCLIKYGHLRVNQTFNWNTTKQEHFPDN

SEQ ID NO: 1350 - protein, 208 aa, Artificial Sequence
  CD80 v106 ECD
VIHVTKEVKEVATLSCGHNVSVEELAQTRIHWQKEKKMVLTMMSGDMNIWPEYKNRTIFDITNNLSIVILALRPSDEGTYECVVLKYEKDAFKREHLAEVTLSVKADFPTPSISDFEIPTSNIRRIICPTSGGFPEPHLSWLENGEELNAINTTVSQDPETELYAVSSKLDFNMTTNHSFMCLIKYGHLRVNQTFNWNTTKQEHFPDN

SEQ ID NO: 1351 - protein, 208 aa, Artificial Sequence
  CD80 v107 ECD
VIHVTKEVKEVATLSCGHNVSVEELAQADILWHKEGKIVLAMRSGDTNIWPEYKNRTIFDITNNLSIVILALRPSDEGTYVCVVRKYENDTPVLEHLAEVTLSLKADFPTPSISDFEIPTSNIRRIICSASGGFPEPHLSWLENGEELSAINTTVSQDPETELYAVSSKLDFNMTTNHSFMCLIKYGHLRVNQTFNWNTTKQEHFPDN

SEQ ID NO: 1352 - protein, 208 aa, Artificial Sequence
  CD80 v108 ECD
VIHVTKEVKEVATLSCGLNVSVEELAQTDILWHKEGKIVLAMRSGDTNIWPEYKNRTIFDITNNLSIVILALRPSDEGTYVCVVRKYENDTPVLEHRAEVTLSVKADFPTPSISDFEIPTSNIRRIICSTSGGFPEPHLSWLENGEELSAINTTVSQDPETELYAVSSKLDFNMTTNHSFMCLIKYGQLRVNQTFNWNTTKQEHFPDN

SEQ ID NO: 1353 - protein, 208 aa, Artificial Sequence
  CD80 v109 ECD
VIHVTKEVKEVATLSCGLNVSVEELAQTDILWHKEGKIVLAMRSGDTNIWPEYKNRTIFDITNNLSIVILALRPSDEGTYVCVVRKYENDTPVLEHRAEVTLSVKADFPTPSISDFEIPTSNIRRIICSTSGGFPEPHLSWLENGEELSAINTTVSQDPETELYAVSSKLDFNMTTNHSFMCLIKYGHLRVNQTFNWNTTKQEHFPDN

SEQ ID NO: 1354 - protein, 208 aa, Artificial Sequence
  CD80 v110 ECD
VIHVTKEVKEVATLSCGLNVSVEELAQTDILWHKEGKIVLAMRSGDTNIWPEYKNRTIFDITNNLSIAILALRPSDEGTYVCVVRKYENDTPVLEHLAEVTLSVKADFPTPSISDFEIPTSNIRRIICSASGGFPEPHLSWLENGEELSAINTIVSQDPETELYAVSSKLDFNMTTNHSFMCLIKYGHLRVNQTFNWNTTKQEHFPDN

SEQ ID NO: 1355 - protein, 208 aa, Artificial Sequence
  CD80 v111 ECD
VIHVTKEVKEVGTLSCGHNVSVEELAQTDILWHKEGKIVLAMRSGDTNIWPEYKNRTIFDITNNLSIAILALRPSDEGTYVCVVRKYENDTPVLEHRAEVTLSVKADFPTPSISDFEIPTSNIRRIICSASGGFPEPHLSWLENGEELNAINTTVSQDPETELYAVSSKLDFNMTTNHSFMCHIKYGHLRVNQTFNWNTTKQEHFPDN

SEQ ID NO: 1356 - protein, 208 aa, Artificial Sequence
  CD80 v112 ECD
VIHVTKEVKEVATLSCGHNVSVEELAQTDILWHKEGKIVLAMRSGDTNIWPEYKNRTIFDITNNLSIVILALRPSDEGTYVCVVRKYENDTPVLEHLAEVTLSVKADFPTPSISDFETPTSNIRRIICSASGGFPEPHLTWLENGEELSAINTTVSQDPETELYAVSSSLDFNMTTNHSFMCLIKYGHLRVNQTFNWNTTKQEHFPDN

SEQ ID NO: 1357 - protein, 208 aa, Artificial Sequence
  CD80 v113 ECD
VIHVTKEVKEVATLSCGHNVSVEELAQTDILWHKEGKIVLAMRSGDTNIWPEYKNRTIFDITNNLSIVILALRPSDEGTYVCVVRKYENDTPVLEHLAEVTLSVKADFPTPSISDFETPTSNIRRIICSASGGFPEPHLSWLENGEELSAINTTVSQDPETELYAVSSILDFNMTTNHSFMCLIKYGHLRVNLTFNWNTTKQEHFPDN

SEQ ID NO: 1358 - protein, 208 aa, Artificial Sequence
  CD80 v114 ECD
VIHVTKEVKEVATLSCGHNVSAEELAQTDILWHKEGKIVLAMRSGDTNIWPEYKNRTIFDITNNLSIVILALRPSDEGTYVCVVRKYENDTPVLEHLAEVTLSVKADFPTPSISDFETPTSNIRRIICSASGGFPEPHLSWLENGEELSAINTTVSQDPETELYAVSSKLDFNMTTNHSFMCLIKYGHLRVNQTFNWNTTKQEHFPDN

SEQ ID NO: 1359 - protein, 208 aa, Artificial Sequence
  CD80 v115 ECD
VIHVTKEVKEVATLSCGHNVSVEELAQTDILWHKEGKIVLAMRSGDTNIWPEYKNRTIFDITNNLSIVILALRPSDEGTYVCVVRKYENDTPVLEHLAEVTLSVKADFPTPSISDFETPTSNIRRIICSASGGFPEPHLSWLENGEELSAINTTVSQDPETELYAVSSKLDFNMTTNHSFMCLIKYGHLRVNQTFNWNTTKQEHFPDN

SEQ ID NO: 1360 - protein, 208 aa, Artificial Sequence
  CD80 v116 ECD
VIHVTKEVKEVATLSCGHNVSVEELAQTDILWHKEGKIVLAMRSGDTNIWPEYKNRTIFDITNNLSIVILALRPSDEGTYVCVVRKYENDTPVLEHLAEVTLSVKADFPTPSISDFETPTSNIRRIICSASGGFPEPHLSWLENGEELSAINTTVSQDPETELYAVSSILDFNMTTNHSFMCLIKYGHLRVNQTFNWNTTKQEHFPDN

SEQ ID NO: 1361 - protein, 208 aa, Artificial Sequence
  CD80 v117 ECD
VIHVTKEVKEVATLSCGHNVSVEELAQTDILWHKEGKIVLAMRSGDTNIWPEYKNRTIFDITNNLSIVILALRPSDEGTYVCVVRKYENDTPVFEHLAEVTLSVKADFPTPSISDFEIPTSNIRRIICSASGGFPEPHLSWLENGEELSAINTTVSQDPETELYAVSSILDFNMTTNHSFMCLIKYGHLRVNQTFNWNTTKQEHFPDN

SEQ ID NO: 1362 - protein, 208 aa, Artificial Sequence
  CD80 v118 ECD
VIHVTKEVKEVATLSCGHNVSVEELAQTRIYWQKEKKMVLTMMSGDMNIWPEYKNRTIFDITNNLSIVILALRPSDEGTYECVVLKYEKDAFKREHLAEVTLSVKADFPTPSISDFETPTSNIRRIIRSTSGGFPEPHLSWLENGEELNAINTTVSQDPETELYAVSSKLDFNMTTNHSFMCLIKYGHLRVNQTFNWNTTKQEHFPDN

SEQ ID NO: 1363 - protein, 208 aa, Artificial Sequence
  CD80 v119 ECD
VIHVTKEVKEVATLSCGHNVSVEELARTCIYWQKEKKMVLTTMSGDMNIWPEYKNRTIFDITNNLSIVILALRPSDEGTYECVVLKYEKDAFKREHLAEVTLSVKADFPTPSISDFEIPTSNIRRIICPTSGGFPEPHLSWLENGEELNAINTTVSQDPGTELYAVSSKLDFNMTTNHSFMCLIKYGHLRVNQTFNWNTTKQEHFPDN

SEQ ID NO: 1364 - protein, 208 aa, Artificial Sequence
  CD80 v120 ECD
VIHVTKEVKEVATLSCGHNVSVEELAQTRIYWQKEKKMVLTMMSGDMNIWPEYKNRTIFDITNNLSIVILALRPSDEGTYECVVLKYEKDAFKREHLAEVTLSVKADFPTPSISDFEIPTSNIRRIICPTSGGFPEPHLSWLENGEELNAINTAVSQDPETELYAVSSKLDFNMTTNHSFMCLIKYGHLRVNQTFNWNTTKQEHFPDN

SEQ ID NO: 1365 - protein, 208 aa, Artificial Sequence
  CD80 v121 ECD
VIHVTKEVKEVATLSCGHNVPVEELAQTRIYWQKEKKMVLTMMSGDMNIWPEYKNRTIFDITNNLSIVIQALRPSDEGTYECVVLKYEKGAFKREHLAEVTLSVKADFPTPSISDFEIPSSNIRRIICSASGGFPEPHLSWLENGEELNAINTTVSQDPETELYAVSSKLDFNMTTNHSFMCLIKYGHLRVNQTFNWNTTKQEHFPDN

SEQ ID NO: 1366 - protein, 101 aa, Artificial Sequence
  CD80 v93 IgV
VIHVTKEVKEVATLSCGLNVSVEELAQTDILWHKEGKIVLAMRSGDTNIWPEYKNRTIFDITNNLSIVILALRLSDEGTNVCVVRKYENDTPVLEHRAEVT

SEQ ID NO: 1367 - protein, 101 aa, Artificial Sequence; identical to SEQ ID NO: 1290
  CD80 v46 IgV

SEQ ID NO: 1368 - protein, 107 aa, Artificial Sequence
  CD80 v18 ECD
VIHVTKEVKEVATLSCGHNVSVEELAQTRIYWQKEKKMVLTMMSGDMNIWPEYKNRTIFDITNNLSIVILALRPSDEGTYECVVLKYEKDGFKREHLAEVTLPVKAD

SEQ ID NO: 1369 - protein, 107 aa, Artificial Sequence
  CD80 v46 IgV
VIHVTKEVKEVATLSCGHNVSVEELAQTRIYWQKEKKMVLTMMSGDMNIWPEYKNRTIFDITNNLSIVILALRPSDEGTYECVVLKYERKGYRREHLAEVTLSVKAD

SEQ ID NO: 1370 - protein, 107 aa, Artificial Sequence; identical to SEQ ID NO: 1246
  CD80 v1 IgV

SEQ ID NO: 1371 - protein, 107 aa, Artificial Sequence
  CD80 v20 IgV
VIHVTKEVKEVATLSCGHNVSVEELAQTRIYWQKEKKMVLTMMSGDMNIWPEYKNRTIFDITNNLSIVILALRPSDEGTYECVVLKYEKDGFKREHLAEVTLSVKAD

SEQ ID NO: 1372 - protein, 107 aa, Artificial Sequence
  CD80 v43 IgV
VIHVTKEVKEVATLSCGHNVSVEELAQTVIYWQKEKKMVLTMQSGDMNIWPEYKNRTIFDITNNLSIVILALRPSDEGTYRCVVIKYERLENQGEHLAEVTLSVKAD

SEQ ID NO: 1373 - protein, 107 aa, Artificial Sequence
  CD80 v44 IgV
VIHVTKEVKEVATLSCGHNVSVEELAQTRIYWQKEKKMVLIMMSGDMNIWPEYKNRTIFDITNNLSIVILALRPSDEGTYECVVLKYEKDGFKREHLAEVTLSVKAD

SEQ ID NO: 1374 - protein, 107 aa, Artificial Sequence; identical to SEQ ID NO: 1368
  CD80 v18 IgV

SEQ ID NO: 1375 - protein, 107 aa, Artificial Sequence
  CD80 v48 IgV
VIHVTKEVKEVATLSCGHNVSVEELAQTRIYWQKEKKMVLTMMSGDMNIWPEYKNRTIFDITNNLSIVILALRPSDEGTYECVVLKYDRKGYRREHLAEVTLSVKAD

SEQ ID NO: 1376 - protein, 107 aa, Artificial Sequence
  CD80 v49 IgV
VIHVTKEVKEVATLSCGHNVSVEELAQTRIYWQKEGQIVMTMMSGDMNIWPEYKNRTIFDITNNLSIVILALRPSDEGTYECVVLKYEKDAFKREHLAEVTLSVKAD

SEQ ID NO: 1377 - protein, 107 aa, Artificial Sequence
  CD80 v50 IgV
VIHVTKEVKEVATLSCGHNVSVEELAQTRIYWQKEGKMVLTMMSGDMNIWPEYKNRTIFDITNNLSIVILALRPSDEGTYECVVLKYEKDAFKREHLAEVTLSVKAD

SEQ ID NO: 1378 - protein, 107 aa, Artificial Sequence
  CD80 v53 IgV
VIHVTKEVKEVATLSCGHNVSVEELAQTVIFWQKEGKLVLTMQSGDMNIWPEYKNRTIFDITNNLSIVILALRPSDEGTYRCIVIKYERLENQGEHLAEVTLSVKAD

SEQ ID NO: 1379 - protein, 107 aa, Artificial Sequence
  CD80 v54 IgV
VIHVTKEVKEVATLSCGHNVSVEELAQTRIYWQKEKKMVLTMMSGDMNIWPEYKNRTIFDITNNLSIMIPAPRPSDEGTYECVVLEYEKDAFKREHLAEVTLSVKAD

SEQ ID NO: 1380 - protein, 107 aa, Artificial Sequence
  CD80 v93 IgV
VIHVTKEVKEVATLSCGLNVSVEELAQTDILWHKEGKIVLAMRSGDTNIWPEYKNRTIFDITNNLSIVILALRLSDEGTNVCVVRKYENDTPVLEHRAEVTLSVKAD

SEQ ID NO: 1381 - protein, 107 aa, Artificial Sequence
  CD80 v19 IgV
VIHVTKEVKEVATLSCGHNVSVEELAQTRIYWQKEKKMVLTMMSGDMNIWPEYKNRTIFDITNNLSIVILALRPSDEGTYECVVLKYEEDAFKREHLAEVTLSVKAD

SEQ ID NO: 1382 - protein, 107 aa, Artificial Sequence
  CD80 v29 IgV
VIHVTKEVKEVATLSCGHNVSVEELAQTRIYWQKEKKMVLTMMSGDMNIWPEYKNRTIFDITNNLSIVILALRPSDEGTYECVVLKYEKDGFKREHLAEVTSSVKAD

SEQ ID NO: 1383 - protein, 208 aa, Artificial Sequence
  CD80 v122 ECD
VIHVTKEVKEVATLSCGHNVSVEELAQTRIYWQKEKKMVLTMMSGDMNIWPEYKNRTIFDITNNLSIVIQALRPSDEGTYECVVLKYEKDGFKREHLAEVTLSVKADFPTPSISDFEIPTSNIRRIICSTSGGFPEPHLSWLEDGEELNAINTTVSQDPETELYAVSSKLDFNMTTNHSFMCLIKYGHLRVNQTFNWNTTKQEHFPDN

SEQ ID NO: 1384 - protein, 208 aa, Artificial Sequence
  CD80 v123 ECD
VIHVTKEVKEVATLSCGHNVSVEELAQTRIYWQKEKKMVLTMMSGDMNIWPEYKNRTIFDITNNLSIVIQALRPSDEGTYECVVLKYEKDGFKREHLAEVTLSVKADFPTPSISDFEAPSSNIRRIICSASGGFPEPHLSWLENGEELNAINTTVSQDPETELYAVSSELDFNMTTNHSFMCLIKYGHLRVNQTFNWNTTKQEHFPDN

SEQ ID NO: 1385 - protein, 208 aa, Artificial Sequence
  CD80 v124 ECD
VIHMTKEVKEVATLSCGHNVSVEELAQTRIYWQKEKKMVLTMMSGDMNIWPEYKNRTIFDITNNLSIVIQALRPSDEGTYECVVLKYEKDGFKREHLAEVTLSVKADFPTPSISDFEVPSSNIRRIICSASGGFPEPHLSWLENGEELNAINTTVSQDPETELYAVSSELDFNMTTNHSFMCLIKYGHLRVNQTFNWNTTKQEHFPDN

SEQ ID NO: 1386 - protein, 208 aa, Artificial Sequence
  CD80 v125 ECD
VIHVTKEVKEVATLSCGHNVSVEELAQTRIYWQKEKKMVLTMMSGDMNIWPEYKNRTIFDITNNLSIVIQALRPSDEGTYECVVLKYEKDGFKREHLAEVTLSVKADFPTPSISDFEVPSSNIRRIICSASGGFPEPHLSWLENGEELNAINTTVSQDPETELYAVSSELDFNMTTNHSFMCLIKYGHLRVNQTFNWNTTKQEHFPDN

SEQ ID NO: 1387 - protein, 208 aa, Artificial Sequence
  CD80 v126 ECD
VIHVTKEVKEVATLSCGHNVSVEELAQTRIYWQKEKKMVLTMMSGDMNIWPEYKNRTIFDITNNLSIVIQALRPSDEGTYECVVLKYEKDGFKREHLAEVTLSVKADFPTPSISDFEVPSSNIRRIICSASGGFPEPHLSWLENGEELNAINTTVSQDPETELYAVSSKLDFNMTTNHSFMCLIKYGHLRVSQTFNWNTTKQEHFPDN

SEQ ID NO: 1388 - protein, 208 aa, Artificial Sequence
  CD80 v127 ECD
VIHVTKEVKEVATLSCGHNLSVEELAQTRIYWQKEKKMVLTMMSGDMNIWPEYKNRTIFDITNNLSIVIQALRPSDEGTYECVVLKYEKDGFKREHLAEVTLSVKADFPTPSISDFEVPSSNIRRIICSASGGFPEPHLSWLENGEELNAINTTVSQDPETELYAVSSKLDFNMTTNHSFMCLIKYGHLRVNQTFNWNTTKQEHFPDN

SEQ ID NO: 1389 - protein, 208 aa, Artificial Sequence
  CD80 v128 ECD
VIHVTKEVKEVATLSCGHNVSVEELAQTRIYWQKEKKMVLTMMSGDMNIWPEYKNRTIFDITNNLSIVIQALRPSDEGTYECVVLKYEKDGFKREHLAEVTLSVKADFPTPSISDFGVPSSNIRRIICSASGGFPEPHLSWLENGEELNAINTTVSQDPETELYAVSSKLDFNMTTNHSFMCLIKYGHLRVNQTFNWNTTKQEHFPDN

SEQ ID NO: 1390 - protein, 208 aa, Artificial Sequence
  CD80 v129 ECD
VIHVTKEVKEVATLSCGHNVSVEELAQTRIYWQKEKKMVLTMMSGDMNIWPEYKNRTIFDITNNLSIVILALRPSDEGTYECVVLKYEKDGFKREHLAEVTLSVKADFPTPSISDFEVPSSNIRRIICSASGGFPEPHLSWLENGEELNAINTTVSQDPETELYAVSSKLDFNMTTNHSFMCLIKYGHLRVNQTFNWNTTKQEHFPDN

SEQ ID NO: 1391 - protein, 208 aa, Artificial Sequence
  CD80 v130 ECD
VIHVTKEVKEVATLSCGHNVSVEELAQTRIYWQKEKKMVLTMMSGDMNIWPEYKNRTIFDITNNLSIVIRALRPSDEGTYECVVLKYEKDGFKREHLAEVTLSVKADFPTPSISDFEVPSSNIRRIICSASGGFPEPHLSWLENGEELNAINTTVSQDPETELYAVSSKLDFNMTTNHSFMCLIKYGHLRVNQTFNWNSTKQEHFPDN

SEQ ID NO: 1392 - protein, 208 aa, Artificial Sequence
  CD80 v131 ECD
VIHVTKEVKEVATLSCGHNVSVEELAQTRIYWQKEKKMVLTMMSGDMNIWPEYKNRTIFDITNNLSIVIQALRPSDEGTYACVVLKYEKDGFKREHLAEVTLSVKADFPTPSISDFEVPSSNIRRITCSASGGFPEPHLSWLENGEELNAINTTVSQDPETELYAVSSKLDFNMTTNHSFMCLIKYGHLRVNQTFNWNTTKQEHFPDN

SEQ ID NO: 1393 - protein, 208 aa, Artificial Sequence
  CD80 v132 ECD
VIHVTKEVKEVATLSCGHNVSVEELAQSRIYWQKEKKMVLTMMSGDMNIWPEYKNRTIFDITNNLSIVIQALRPSDEGTYECVVLKYEKDGFKRKHLAEVTLSVKADFPTPSISDFEVPSSNIRRVICSASGGFPEPHLSWLENGEELNAINTTVSQDPETELYAVSNKLDFNMTTNHSFMCLIKYGHLRVNQTFNWNTTKQEHFPDN

SEQ ID NO: 1394 - protein, 208 aa, Artificial Sequence
  CD80 v133 ECD
VIHVTKEVKEVATLSCGHNVSVEELAQTRIYWQKEKKMVLTMMSGDMNIWPEYKNRTIFDITSNLSIVIQALRPSDEGTYECVVLKYEKDGFKREHLAEVTLSVKADFPTPSITDFEVPSSNIRRIICSASGGFPEPHLSWLENGEELNAINTTVSQDPETELYAVSSKLDFNMTTNHSFMCLIKYGDLRVNQTFNWNTTKQEHFPDN

SEQ ID NO: 1395 - protein, 208 aa, Artificial Sequence
  CD80 v134 ECD
VIHVTKEVKEVATLSCGHNVSVEELAQTRIYWQKEEKMVLTMMSGDMNIWPEYKNRTIFDITNNLSTVIQALRPSDEGTYECVVLKYEKDGFKREHLAEVTLSVKADFPTPSISDFEVPSSNIRRIICSASGGFPEPHLSWLENGEELNAITTTVSQDPETELYAVSSKLDFNMTTNHSFMCLIKYGHLRVNQTFNWNTTKQEHFPDN

SEQ ID NO: 1396 - protein, 208 aa, Artificial Sequence
  CD80 v135 ECD
VIHVTKEVKEVATLSCGHNVSVEELAQTRIYWQKEKKMVLTMMSGDMNIWPGYKNRTIFDITNNLSIVIQALRPSDEGTYECVVLKYEKDGFKREHLAEVTLSVKANFPTPSISDFEVPSSNIRRIICSASGGFPEPHLSWLENGEELNAINTTVSQDPETELYAVSSELDFNMTTNHSFMCLIKYGHLRVNQTFNWNTTKQEHFPDN

SEQ ID NO: 1397 - protein, 208 aa, Artificial Sequence
  CD80 v136 ECD
VIHVTKEVKEVATLSCGHNVSVEELAQTRIYWQKEKEMVLTMMSGDMNIWPEYKNRTISDITNNLSIVIQALRPSDEGTYECVVLKYEKDGFKREHLAEVTLSVKADFPTPSISDFEVPSSNIRRIICSASGGFPEPHLSWLENGEELNAINTTVSQDPETELYAVSSKLDFNMTTNHSFMCLIEYGHLRVNQTFNWNTTKQEHFPDN

SEQ ID NO: 1398 - protein, 208 aa, Artificial Sequence
  CD80 v137 ECD
VIHVTKEVKEVATLSCGHNVSVEELAQTRIYWQKEKKMVLTMMSGDMNIWPEYKNRTIFVITNNLSIVILALRPSDEGTYECVVLKYEKDGFKREHLAEVTLSVKADFPTPSISDFEVPSSNIRRIICSASGGFPEPHLSWLENGEELNAINTTVSQDPETELYAVSSELDFNMTTNHSFMCLIKYGHLRVNQTFNWNTTKQEHFPDN

SEQ ID NO: 1399 - protein, 208 aa, Artificial Sequence
  CD80 v138 ECD
VIHVTKEVKEVATLSCGHNVSVEELAQTRIYWQKEKKMVLTMMSGDMNIWPEYMNRTIFDITNNLSIVIQALRPSDEGTYECVVLKYEKDGFKREHLAEVTLSVKADFPTPSISDFEIPTSNIRRIICSTSGGFPEPHLSWLENGEELNAINTTVSQDPETELHAVSSKLDFNMTTNHSFMCLIKYGDLRVNQTFNWNTTKQEHFPDN

SEQ ID NO: 1400 - protein, 208 aa, Artificial Sequence
  CD80 v139 ECD
VIHVTKEVKEVATLSCGHNVSVEELAQTRIYWQKEKKTVLTMMSGDMNIWPEYKNRTIFDITNNLSIVIQALRPSDGGTYECVVLKYEKDGFKREHLAEVTLSVKADFPTPSISDFEVPSSNIRRIICSASGGFPEPHLSWLENGEELNAITTTVSQDPETELYAVSSKLDFNMTTNHSFMCLIKYGHLRVNQTFNWNTTKQEHFPDN

SEQ ID NO: 1401 - protein, 208 aa, Artificial Sequence
  CD80 v140 ECD
VIHVTKEVKEVATLSCGHNVSVEELAQTRIHWQKEKKMVLGMLSGDMNIWPEYKNRTIFDITNNLSIVIQALRPSDEGTYECVVLKYEKDGFKREHLAEVTLSVKADFPTPSISDFEVPSSNIRRVICSASGGFPEPHLSWLENGEELNAINTTVSQDPETELYAVSSKLDFNMTTNHSFMCLIKYGHLRVNQTFNWNTTKQEHFPDN

SEQ ID NO: 1402 - protein, 208 aa, Artificial Sequence
  CD80 v141 ECD
VIHVTKEVKEVATLSCGHNVSVEELAQTRIYWQKEKKMVLTMMSGDMNIWPEYKNRTIFDITNNHSIVILALRPSDEGTYECVVLKYEKGAFKREHLAEVTLSVKADFPAPSISDLEIPTSNIRRIICSTSGGFPEPHLSWLENGEELNAINTTVSQDPETELYAVSSKLDFNMTTNHSFMCLIKYGHLRVNQTFNWNTTKQEHFPDN

SEQ ID NO: 1403 - protein, 208 aa, Artificial Sequence
  CD80 v142 ECD
VIHVTKEVKEVATLSCGHNVSVEELAQTHIYWQKEKKMVLTMMSGDMNIWPGYKNRTIFDITNNLSIVILALRPSDEGTYECVVLKYEKNAFKREHLAEVTLSVKADFPTPSISDFEVPSSNIRRIICSASGGFPEPHLSWLENGEELNAINTTVSQDPETELYAVSSKLDFNMTTNHSFMCLIKYGHLRVNQTFNWNTTKQEHFPDN

SEQ ID NO: 1404 - protein, 208 aa, Artificial Sequence; identical to SEQ ID NO: 1403
  CD80 v143 ECD

SEQ ID NO: 1405 - protein, 208 aa, Artificial Sequence
  CD80 v144 ECD
VIHVTKEVKEVATLSCGHNVSVEELAQTRIYWQKEKKMVLTMMSGDMNIWPEYKNRTIFDITNNLSTVIQALRPSDEGTYECVVLKYEKDGFKREHLAEVTLSVKADFPTPSISDFEVPSSNIRRIICSTSGGFPEPHLSWLENGEELNAINTTVSQDPETELYAVSSKLDFNMTTNHSFMCLIKYGHLRVNQTFHWNTTKQEHFPDN

SEQ ID NO: 1406 - protein, 208 aa, Artificial Sequence
  CD80 v145 ECD
VIHVTKEVKEVATLSCGHNVSVEELAQTRIYWQKEKKMVLTMMSGDMNIWPEYKNRTIFDITNNLSIVIQALRPSDEGTYECVVLKYEKDGFKREHLAEVTLSVKADFPAPSISDFEVPSSNIRRIICSASGGFPEPHLSWLENGEELNAINTTVSQDPETELYAVSSKLDFNMTTNHSFMCLIKYGHLRVNQTFNWNTTKQEHFPDN

SEQ ID NO: 1407 - protein, 208 aa, Artificial Sequence
  CD80 v146 ECD
VIHVTKEVKEVATLSCGHNVSVEELAQTRIYWQKEKKVVLDMISGDMNIGPEYKNRTIFDITNNLSIVILALRPSGEGTYECAVLKYEEDAFKREHLAEVTLSVKADFPTPSISDFEVPSSNIRRVICSASGGFPEPHLSWLENGEELNAINTTVSQDPETELYAVSSKLDFNMTTNHSFMCLIKYGHLRVNQTFNWNTTKQEHFPDN

SEQ ID NO: 1408 - protein, 208 aa, Artificial Sequence
  CD80 v147 ECD
VIHVTKEVKEVVTLFCGHNVSVEELAQTRIHWQKEKKLVLGMLSGDMNIWPEYKNRTIFDITNNLSIVILALRPSDEGTYECVVLKYEKNAFKREHLAEVTLSVKADFPTPSISDFEIPTSNIRRIICSASGGFPELHLSWLENGEELDAITTTVSQDPETELYAVSSKLDFNMTTNHSFMCLIKYGHLRVNQTFNWNTTKQEHFPDN

SEQ ID NO: 1409 - protein, 208 aa, Artificial Sequence
  CD80 v148 ECD
VIHVTKEVKEVATLSCGHNVSVEELAQTRIYWQKEKKMVLTMMSGDMNIWPEYKNRTIFDITNNLSFVIRALRPSDEGTYECVVLKYGKDGFKREHLAEVTLSVKADFPTPSISDFEVPSSNIRRIICSASGGFPEPHLSWLENGEELNAINTTVSQDPETELYAVSSKLDFNMTTNHSFMCLIKYGHLRVNQTFNWNTTKQEHFPDN

SEQ ID NO: 1410 - protein, 208 aa, Artificial Sequence
  CD80 v149 ECD
VIHVTKEVKEVATLSCGHNVSVEGPAQTRIYWQKEKKMVLTMMSGDMNIWPEYKNRTIFDITNNLSIVIQALRPSDEGTYECVVLKYEKDGFKREHLAEVTLSVKADFPTPSISDFEVPSSNIRRIICSTSGGFPEPHLSWLENGEELNAITTTVSQDPETELYAVSSKLDFNMTTNHSFMCLIKYGHLRVNQTFNWNTTKQEHFPDN

SEQ ID NO: 1411 - protein, 208 aa, Artificial Sequence
  CD80 v150 ECD
VIHVTKEVKEVATLSCGHNVSVEELAQTRIYWQKEKKMVLTMMSGDMNIWPEYKNRTIFDITNNLSIVILALRPSDEGTYECVVLKYEKDGLKREHLAEVTLSVKADLPTPSISDFEVPSSNIRRIICSTSGGFPEPHLSWLENGEELNAINTTVSQDPETELYAVSSKLDFNMTTNHSFMCLIKYGHLRVNQTFNWNTTKQEHFPDN

SEQ ID NO: 1412 - protein, 208 aa, Artificial Sequence
  CD80 v151 ECD
VIHVTKEVKEVATLSCGHNVSVEELAQTRIYWQKEKKMVLTMMSGDMNIWPEYKNRTIFDITNNLSIVILALRPSDEGTYECVVLKYDRKGYRREHLAEVTLSVKADFPTPSISDFEIPTSSIRRIICSTSGGFPEPHLSWLENGEELNAINTTVSQDPETELYAVSSKLDFNMTTSHSFMCLIKYGHLRVNQTFNWNTTKQEHFPDN

SEQ ID NO: 1413 - protein, 208 aa, Artificial Sequence
  CD80 v152 ECD
VIHVTKEVKEVATLSCGHNVSVEELAQTRIYWQKEGQIVMTMMSGDMNIWPEYKNRTILDITNNLSIVILALRPSDEGTYVCVVRKYENDTPVLEHLAGVTLSVKADFPTPSISDFEIPTSNIRRIICSASGGFPEPHLSWLENGEELSAINTTVSQDPETELYAVSSKLDFNMTTNHSFMCLIKYGHLRVNQTFNWNTTKQEHFPDN

SEQ ID NO: 1414 - protein, 208 aa, Artificial Sequence
  CD80 v153 ECD
VIHVTKEVKEVATLSCGHNVSVEELAQTRIYWQKEGKMVMTMMSGDMNIWPEYKNRTIFDITNNLSIVILALRPSDEGTYECVVLKYEKDAFKREHLAEVTLSVKADFPTPSISDFEIPTSNIRRIICSTSGGFPEPHLSWLENGEELNAINTTVSQDPETELYAVSSKLDFNMTTNHSFMCLIKYGHLRVNQTFNWNTTKQEHFPDN

SEQ ID NO: 1415 - protein, 208 aa, Artificial Sequence
  CD80 v154 ECD
VIHVTKEVKEVATLSCGHNVSVEELAQTDILWHKEGKIVLAMRSGDTNIWPEYKNRTIFDITNNLSIVILALRPSDEGTYVCVVRKYENDTPVLEHLAEVTLSVKADFPTPSISDFEVPSSNIRRITCSASGGFPEPHLSWLENGEELNAINTTVSQDPETELYAVSSELDFNMTTNHSFMCLIKYGHLRVNQTFNWNTTKQEHFPDN

SEQ ID NO: 1416 - protein, 208 aa, Artificial Sequence
  CD80 v155 ECD
VIHVTKEVKEVATLSCGHNVSVEELAQTDILWHKEGKIVLAMRSGDTNIWPEYKNRTIFDITNNLSIVIQALRPSDEGTYVCVVRKYENDTPVLEHLAEVTLSVKADFPTPSISDFEVPSSNIRRITCSASGGFPEPHLSWLENGEELNAINTTVSQDPETELYAVSSKLDFNMTTNHSFMCLIKYGHLRVNQTFNWNTTKQEHFPDN

SEQ ID NO: 1417 - protein, 208 aa, Artificial Sequence; identical to SEQ ID NO: 1321
  CD80 v156 ECD

SEQ ID NO: 1418 - protein, 208 aa, Artificial Sequence
  CD80 v157 ECD
VIHVTKEVKEVATLSCGHNVSVEELAQTDILWHKEGKIVLAMRSGDTNIWPEYKNRTIFDITNNLSIVILALRPSDEGTYVCVVRKYENDTPVLEHLAEVTLSVKADFPTPSISDFEVPSSNIRRIICSASGGFPEPHLSWLENGEELNAINTTVSQDPETELYAVSSELDFNTTTNHSFMCLIKYGHLRVNQTFNWNTTKQEHFPDN

SEQ ID NO: 1419 - protein, 208 aa, Artificial Sequence
  CD80 v158 ECD
VIHVTKEVKEVATLSCGHNVSVEELAQTDILWHKEGKIVLAMRSGDTDIWPEYKNRTILDITNNLSIVILALRPSDEGTYVCVVRKYENDTPVLEHLAEVTLSVKADFPTPSISDFEVPSSNIRRITCSASGGFPEPHLSWLENGEELNAINTTVSQDPETELYAVSSKLDFNMTTNHSFMCLIKYGDLRVNQTFNWNTTKQEHFPDN

SEQ ID NO: 1420 - protein, 208 aa, Artificial Sequence
  CD80 v159 ECD
VIHVTKEVKEVATLSCGRNVSVEELAQTDILWHKEGEIVLAMRSGDTNIWPEYKNRTIFDITNNLSIVIQALRPSDEGTYVCVVRKYENDTPVLEHLAEVTLSVKADFPTPSISDFEVPSSNIRRIICSASGGFPEPHLSWLENGEELNAINTTVSQDPETELYAVSSELDFNMTTNHSFMCLIKYGDLRVNQTFNWNTTKQEHFPDN

SEQ ID NO: 1421 - protein, 208 aa, Artificial Sequence
  CD80 v160 ECD
VIHVTKEVKEVATLSCGHNVSVEELAQTDILWHKEGKIVLAMRSGDTNIWPEYKNRTIFDITNNLSIVIQALRPSDEGTYVCVVRKYENDTPVLEHLAEVTLSVKADFPTPSISDFEVPSSNIRRITCSASGGFPEPHLSWLGNGEELNAINTTVSQDPETELYAVSSELDFNVTTNHSFMCLIKYGDLRVNQTFNWNTTKQEHFPDN

SEQ ID NO: 1422 - protein, 208 aa, Artificial Sequence
  CD80 v161 ECD
VIHVTKEVKEVATLSCGHNVSVEELAQTDVLWHKEGKIVLAMRSGDTNIWPEYKNRTIFDITNNLSIVILALRPSDEGTYVCVVRKYENDTPVLEHLAEVTLSVKADFPTPSISDFEVPSSNIRRITCSASGGFPEPHLSWLENGEELNAINTTVSQDPETELYAVSSKLDFNMTTNHSFMCLIKYGDLRVNQTFNWNTTKQEHFPDN

SEQ ID NO: 1423 - protein, 208 aa, Artificial Sequence
  CD80 v162 ECD
VIHVTKEVKEVATLSCGHNVSVEELAQTDILWHKEGKIVLAMRSGDTNIWPEYKNRTIFDITNNLSIVILALRPSDEGTYVCVVRKYENDTPVLEHLAEVTLSVKADFPTPSISDFEVPSSNIRRITCSASGGFPEPHLSWLENGEELNAINTTVSQDPETELYAVSSKLDFNMTTNHSFMCLIKYGDLRVNQTFNWNTTKQEHFPDN

SEQ ID NO: 1424 - protein, 208 aa, Artificial Sequence
  CD80 v163 ECD
VIHVTKEVKEVATLSCGHNVSVEELAQTDILWHKEGKIVLAMRSGDTNIWPEYKNRTIFDITNNLSIVIQALRPSDEGTYVCVVRKYENDTPVLEHLAEVTLSVKADFPTPSISDFEVPSSNIRRITCSASGGFPEPHLSWLENGEELNAINTTVSQDPETELYAVSSELDFNMTTNHSFMCLIKYGHLRVNQTFNWNTTKQEHFPDN

SEQ ID NO: 1425 - protein, 208 aa, Artificial Sequence
  CD80 v164 ECD
VIHVTKEVKEVATLSCGHNVSVEELAQTDILWHKEGKIVLAMRSGDTNIWPEYKNRTIFDITNNLSIVIQALRPSDEGTYVCVVLKYENDTPVLEHLAEVTLSVKADFPTPSISDFEVPSSNIRRITCSASGGFPEPHLSWLENGEELNAINTTVSQDPETELYAVSSKLDFNMTTNHSFMCLIKYGHLRVNQTFNWNTTKQEHFPDN

SEQ ID NO: 1426 - protein, 208 aa, Artificial Sequence
  CD80 v165 ECD
VIHVTKEVKEVATLSCGHNVSVEELAQTDILWHKEGKIVLAMRSGDTNIWPEYKNRTIFDITNNLSIVILALRPSDEGTYECVVRKYENDTPVLEHLAEVTLSVKADFPTPSISDFEVPSSNIRRITCSASGGFPEPHLSWLENGEELNAINTTVSQDPETELYAVSSELDFNMTTNHSFMCLIKYGDLRVNQTFNWNTTKQEHFPDN

SEQ ID NO: 1427 - protein, 208 aa, Artificial Sequence
  CD80 v166 ECD
VIHVTKEVKEVATLSCGHNVSVEELAQTDILWHKEGKIVLAMRSGDTNIWPEYKNRTIFDITNNLSIVILALRPSDEGTYVCVVRKYENDTPVLEHLAEVTLSVKADLPTPSISDFEVPSSNIRRIICSASGGFPEPHLSWLENGEELNAINTTVSQDPETELYAVSSELDFNMTTNHSFMCLIKYGDLRVNQTFNWNTTKQEHFPDN

SEQ ID NO: 1428 - protein, 208 aa, Artificial Sequence
  CD80 v167 ECD
VIHVTKEVKEVATLSCGHNVSVEELAQTDILWHKEGKIVLAMRSGDTNIWPEYKNRTIFDITNNLSIVIQALRPSDEGTYVCVVRKYENDTPVLEHLAEVTLSVKADFPTPSISDFEVPSSNIRRIICSASGGFPEPHLSWLENGEELDAINTTVSQDPETELYAVSSELDFNMTTNHSFMCLIKYGDLRVNQTFNWNTTKQEHFPDN

SEQ ID NO: 1429 - protein, 208 aa, Artificial Sequence
  CD80 v168 ECD
VIHVTKEVKEVATLSCGLNVSVEELAQTDILWHKEGKIVLAMRSGDTNIWPEYKNRTIFDITNNLSIVIQALRPSDEGTYVCVVRKYENDTPVLEHLAEVTLSVKADFPTPSISDFEVPSSNIRRIICSASGGFPEPHLSWLENGEELNAINTTVSQDPETELYAVSSELDFNMTTNHSFMCLIKYGDLRVNQTFNWNTTKQEHFPDN

SEQ ID NO: 1430 - protein, 208 aa, Artificial Sequence
  CD80 v169 ECD
VIHVTKEVKEVATLSCGHNVSVEELAQTDILWHKEGKIVLAMRSGDTNIWPEYKNRTIFDITNNLSIVILALRPSDEGTYVCVVRKYENDTPVLEHLAEVTLSVKADFPTPSISDFEVPSSNIRRITYSASGGFPEPHLSWLENGEELNAINTTVSQDPETELYAVSSKLDFNMTTNHSFMCLIKYGDLRVNQTFNWNTTKQEHFPDN

SEQ ID NO: 1431 - protein, 208 aa, Artificial Sequence
  CD80 v170 ECD
VIHVTKEVKEVATLSCGLNVSVEELAQTDILWHKEGKIVLAMRSGDTNIWPEYKNRTIFDITNNLSIVILALRPSDEGTYVCVVRKYENDTPVLEHLADVTLSVKADFPTPSISDFEIPTSNIRRIICSASGGFPEPHLSWLENGEELNAINTTVSQDPETELYAVSSKLDFNMTTNHSFMCLIKYGHLRVNQTFNWNTTKQEHFPDN

SEQ ID NO: 1432 - protein, 208 aa, Artificial Sequence
  CD80 v171 ECD
VIHVTKEVKEVATLSCGLNVSVEELAQTDILWHKEGKIVLAMRSGDTNIWPEYKNRTIFDITNNLSIVIQALRPSDEGTYVCVVRKYENDTPVLEHLAEVTLSVKADFPTPSISDFEVPSSNIRRIICSASGGFPEPHLSWLENGEELNAINTTVSQDPETELYAVSSELDFNMTTNHSFMCLIKYGHLRVNQTFNWNTTKQEHFPDN

SEQ ID NO: 1433 - protein, 208 aa, Artificial Sequence
  CD80 v172 ECD
VIHVTKEVKEVATLSCGHNVSVEELAQTDILWHKEGKIVLAMRSGDTNIWPEYKNRTIFDNTNNLSIVILALRPSDEGTYVCVVRKYENDTPVFEHLAEVTLSAKADFPTPSISDFEVPSSNIRRVICSASGGFPEPHLSWLENGEELNAINTTVSQDPETELYAVSSKLDFNMTTNHSFMCLIKYGHLRVNQTFNWNTTKQEHFPDN

SEQ ID NO: 1434 - protein, 208 aa, Artificial Sequence
  CD80 v173 ECD
VIHVTKEVKEVATLSCGHNVSVEELAQTDILWHKEGKIVLAMRSGDTNIWPEYKNRTIFDITNNLSIVILALRPSDEGTYVCVVRKYENDTPVFEHLAEVTLSVKADFPTPSISDFEVPSSNIRRIICSASGGFPEPHLSWLENGEELNAINTTVSQDPETELYAVSSKLDFNMTTNHSFMCLIKYGHLRVNQTFNWNTTKQEHFPDN

SEQ ID NO: 1435 - protein, 208 aa, Artificial Sequence; identical to SEQ ID NO: 1324
  CD80 v174 ECD

SEQ ID NO: 1436 - protein, 208 aa, Artificial Sequence
  CD80 v175 ECD
VIHVTKEVKEVATLSCGLNVSVEELAQTDILWHKEGKIVLAMRSGDTNIWPEYKNRTIFDITNNLSIVILALRPSDEGTYVCVVRKYENDTPVLEHLAEVTLSVKADFPTPSISDFEVPSSNIRRITCSASGGFPEPHLSWSENGEELNAINTTVSQDPETELYAVSSKLDFNMTTNHSFMCLIKYGDLRVNQTFNWNTTKQEHFPDN

SEQ ID NO: 1437 - protein, 208 aa, Artificial Sequence
  CD80 v176 ECD
VIHVTKEVKEVATLSSGLNVSVEELAQTDILWHKEGKIVLAMRSGDTNIWPEYKNRTIFDITNNLSIVILALRPSDEGTYVCVVRKYENDTPVLEHLAEVTLSVKADFPAPSISDFEVPTSNIRRIICSTSGGFPEPHLSWLENGEELNAINTTVSQDPETELYAVSSKLDFNMTTNHSFMCLIKYGDLRVNQTFNWNTTKQEHFPDN

SEQ ID NO: 1438 - protein, 208 aa, Artificial Sequence
  CD80 v177 ECD
VIHVTKEVKEVATLSCGHNVSVEELAQTDILWHKEGKIVLAMRSGDTNIWPEYKNRTIFDITNNLSIVILALRPSDEGTYECVVLKYEKDGFKREHLAEVTLSVKADFPTPSISDFEVPSSNIRRITCSASGGFPEPHLSWLENGEELNAINTTVSQDPETELYAVSSKLDFNMTTNHSFMCLIKYGDLRVNQTFNWNTTKQEHFPDN

SEQ ID NO: 1439 - protein, 208 aa, Artificial Sequence
  CD80 v178 ECD
VIHVTKEVKEVATLSCGHNVSVEELAQTDILWHKEGKIVLAMRSGDTNIWPEYKNRTIFDITNNLSIVIQALRPSGEGTYECVVLKYEKDGFKREHLAEVTLLVKADFPTPSISDFEVPSSNIRRITCSASGGFPEPHLSWLENGEELNAINTTVSQDPETELYAVSSKLDFNMTTNHSFMCLIKYGHLRVNQTFNWNTTKQEHFPDN

SEQ ID NO: 1440 - protein, 208 aa, Artificial Sequence
  CD80 v179 ECD
VIHVTKEVKEVATLSCGHNVSVEELAQTRIYWQKEKKMVLTMMSGDMNIWPECKNRTIFDITNNLSIVILALRPSDEGTYECVVRKYENDTPVLEHLAEVTLSVKADFPTPSISDFEVPSSNIRRITCSASGGFPEPHLSWLENGEELNAINTTVSQDPETELYAVSSELDFNMTTNHSFMCLIKYGHLRVNQTFNWNTTKQEHFPDN

SEQ ID NO: 1441 - protein, 208 aa, Artificial Sequence
  CD80 v180 ECD
VIHVTKEVKEVATLSCGHNVSVEELAQTRIYWQKEKKMVLTMMSGDMNIWPEYKNRTIFDISNNLSIVILALRPSDEGTYVCVVRKYENDTPVLEHLAEVTLSVKADFPTPSISDFEVPSSNIRRIICSASGGFPEPHLSWLENGEELNAINTTVSQDPETELYAVSSELDFNMTTNHSFMCLIKYGHLRVNQTFNWNTTKQEHFPDN

SEQ ID NO: 1442 - protein, 208 aa, Artificial Sequence
  CD80 v181 ECD
VIHVTKEVKEVATLSCGHNVSVEELAQTRIYWQKEKKMVLTMMSGDMNIWPECKNRTIFDITNNLSIVIQALRPSDEGTYECVVLKYEKGAFKREHLAEVTLSVKADFPTPSISDFEIPTSNIRRIICSASGGFPEPHLSWLENGEELDAITTTVSQDPETELYAVSSKLDFNMTTNHSFMCLIKYGDLRVNQTFNWNTTKQEHFPDN

SEQ ID NO: 1443 - protein, 208 aa, Artificial Sequence
  CD80 v182 ECD
VIHVTKEVKEVATLSCGLNVSVEELAQTDILWHKEGKIVLAMRSGDTNIWPEYKNRTIFDITNNLSIVILALRPSDEGTYVCVVRKYENDTPVLEHLAEVTLSVKADFPTPSISDFEVPSSNIRRITCSASGGFPEPHLSWLENGEELNAINTTVSQDPETELYAVSSKLDFNMTTNHSFMCLIKYGDLRVNQTFNWNTTKQEHFPDN

SEQ ID NO: 1444 - protein, 208 aa, Artificial Sequence
  CD80 v183 ECD
VIHVTKEVKEVATLSCGLNVSVEELAQTDILWHKEGKIVLAMRSGDTNIWPEYKNRTIFDITNNLSIVILALRPSDEGTYVCVVRKYENDTPVLEHLAEVTLSVKADFPTPSISDFEIPTSNIRRIICSASGGFPEPHLSWLENGEELSAINTTVSQDPETELYAVSSKLDFNMTTNHSFMCLIKYGHLRVNQTFNWNTTKQEHFPDN

SEQ ID NO: 1445 - protein, 101 aa, Artificial Sequence
  CD80 v153 IgV
VIHVTKEVKEVATLSCGHNVSVEELAQTRIYWQKEGKMVMTMMSGDMNIWPEYKNRTIFDITNNLSIVILALRPSDEGTYECVVLKYEKDAFKREHLAEVT

SEQ ID NO: 1446 - protein, 107 aa, Artificial Sequence
  CD80 v153 IgV
VIHVTKEVKEVATLSCGHNVSVEELAQTRIYWQKEGKMVMTMMSGDMNIWPEYKNRTIFDITNNLSIVILALRPSDEGTYECVVLKYEKDAFKREHLAEVTLSVKAD

SEQ ID NO: 1447 - protein, 208 aa, Artificial Sequence
  CD80 v1 ECD
VIHVTKEVKEVATLSCGHNVSVEELAQTRIYWQKEKKMVLTMMSGDMNIWPEYKNRTIFDITNNLSIVIQALRPSDEGTYECVVLKYEKDGFKREHLAEVTLSVKADFPTPSISDFEIPTSNIRRIICSTSGGFPEPHLSWLENGEELNAINTTVSQDPETELYAVSSKLDFNMTTNHSFMCLIKYGHLRVNQTFNWNTTKQEHFPDN

SEQ ID NO: 1448 - protein, 208 aa, Artificial Sequence
  CD80 v2 ECD
VIHVTKEVKEVATLSCGHNVSVEELAQTRIYWQKEKKMVLTMMSGDMNIWPEYKNRTIFDITNNLSIVIQALRPSDEGTYECVVLKYEKDGFKREHLAEVTLSVKADFPTPSISDFEIPTSNIRRIICSASGGFPEPHLSWLENGEELNAINTTVSQDPETELYAVSSKLDFNMTTNHSFMCLIKYGHLRVNQTFNWNTTKQEHFPDN

SEQ ID NO: 1449 - protein, 208 aa, Artificial Sequence
  CD80 v3 ECD
VIHVTKEVKEVATLSCGHNVSVEELAQTRIYWQKEKKMVLTMMSGDMNIWPEYKNRTIFDITNNLSIVIQALRPSDEGTYECVVLKYEKDGFKREHLAEVTLSVKADFPTPSISDFEAPSSNIRRIICSASGGFPEPHLSWLENGEELNAINTTVSQDPETELYAVSSKLDFNMTTNHSFMCLIKYGHLRVNQTFNWNTTKQEHFPDN

SEQ ID NO: 1450 - protein, 208 aa, Artificial Sequence
  CD80 v4 ECD
VIHMTKEVKEVATLSCGHNVSVEELAQTRIYWQKEKKMVLTMMSGDMNIWPEYKNRTIFDITNNLSIVIQALRPSDEGTYECVVLKYEKDGFKREHLAEVTLSVKADFPTPSISDFEIPSSNIRRIICSASGGFPEPHLSWLENGEELNAINTTVSQDPETELYAVSSKLDFNMTTNHSFMCLIKYGHLRVNQTFNWNTTKQEHFPDN

SEQ ID NO: 1451 - protein, 208 aa, Artificial Sequence
  CD80 v5 ECD
VIHVTKEVKEVATLSCGHNVSVEELAQTRIYWQKEKKMVLTMMSGDMNIWPEYKNRTIFDITNNLSIVIQALRPSDEGTYECVVLKYEKDGFKREHLAEVTLSVKADFPTPSISDFEIPSSNIRRIICSASGGFPEPHLSWLENGEELNAINTTVSQDPETELYAVSSKLDFNMTTNHSFMCLIKYGHLRVNQTFNWNTTKQEHFPDN

SEQ ID NO: 1452 - protein, 208 aa, Artificial Sequence
  CD80 v6 ECD
VIHVTKEVKEVATLSCGHNLSVEELAQTRIYWQKEKKMVLTMMSGDMNIWPEYKNRTIFDITNNLSIVIQALRPSDEGTYECVVLKYEKDSFKREHLAEVTLSVKADFPTPSISDFEIPSSNIRRIICSASGGFPEPHLSWLENGEELNAINTTVSQDPETELYAVSSKLDFNMTTNHSFMCLIKYGHLRVNQTFNWNTTKQEHFPDN

SEQ ID NO: 1453 - protein, 208 aa, Artificial Sequence
  CD80 v7 ECD
VIHVTKEVKEVATLSCGHNVSVEELAQTRIYWQKEKKMVLTMMPGDMNIWPEYKNRTIFDITNNLSIVIQALRPSDEGTYECVVLKYEKDGFKREHLAEVTLSVKADFPTPSISDFEIPTSNIRRIICSASGGFPEPHLSWLENGEELNAINTTVSQDPETELYAVSSKLDFNMTTNHSFMCLIKYGHLRVNQTFNWNTTKQEHFPDN

SEQ ID NO: 1454 - protein, 208 aa, Artificial Sequence
  CD80 v8 ECD
VIHVTKEVKEVATLSCGHNVSVEELAQTRIYWQKEKKMVLTMMSGDMNIWPEYKNRTIFDITNNLSIVIQALRPSDEGTYECVVLKYEKDGFKREHLAEVTLSVKADFPTPSISDFGIPSSNIRRIICSASGGFPEPHLSWLENGEELNAINTTVSQDPETELYAVSSKLDFNMTTNHSFMCLIKYGHLRVNQTFNWNTTKQEHFPDN

SEQ ID NO: 1455 - protein, 208 aa, Artificial Sequence
  CD80 v9 ECD
VIHVTKEVKEVATLSCGHNVSVEELAQTRIYWQKEKKMVLTMMSGDMNIWPEYKNRTIFDITNNLSIVILALRPSDEGTYECVVLKYEKDGFKREHLAEVTLSVKADFPTPSISDFEIPSSNIRRIICSASGGFPEPHLSWLENGEELNAINTTVSQDPETELYAVSSKLDFNMTTNHSFMCLIKYGHLRVNQTFNWNTTKQEHFPDN

SEQ ID NO: 1456 - protein, 208 aa, Artificial Sequence
  CD80 v10 ECD
VIHVTKEVKEVATLSCGHNVSVEELAQTRIYWQKEKKMVLTMMSGDMNIWPEYKNRTIFDITNNLSIVIRALRPSDEGTYECVVLKYEKDGFKREHLAEVTLSVKADFPTPSISDFEIPSSNIRRIICSASGGFPEPHLSWLENGEELNAINTTVSQDPETELYAVSSKLDFNMTTNHSFMCLIKYGHLRVNQTFNWNTTKQEHFPDN

SEQ ID NO: 1457 - protein, 208 aa, Artificial Sequence
  CD80 v11 ECD
VIHVTKEVKEVATLSCGHNVSVEELAQTRIYWQKEKKMVLTMMSGDMNIWPEYKNRTIFDITNNLSIVIQALRPSDEGTYACVVLKYEKDGFKREHLAEVTLSVKADFPTPSISDFEIPSSNIRRITCSASGGFPEPHLSWLENGEELNAINTTVSQDPETELYAVSSKLDFNMTTNHSFMCLIKYGHLRVNQTFNWNTTKQEHFPDN

SEQ ID NO: 1458 - protein, 208 aa, Artificial Sequence
  CD80 v12 ECD
VIHVTKEVKEVATLSCGHNVSVEELAQTRIYWQKEKKMVLTMMSGDMNIWPEYKNRTIFDITNNLSIVIQALRPSDEGTYECVVLKNEKDGFKREHLAEVTLSVKADFPTPSISDFEIPTSNIRRIICSASGGFPEPHLSWLENGEELNAINTTVSQDPETELYAVSSKLDFNMTTNHSFMCLIKYGHLRVNQTFNWNTTKQEHFPDN

SEQ ID NO: 1459 - protein, 208 aa, Artificial Sequence
  CD80 v13 ECD
VIHVTKEVKEVATLSCGHNVSVEELAQSRIYWQKEKKMVLTMMSGDMNIWPEYKNRTIFDITNNLSIVIQALRPSDEGTYECVVLKYEKDGFKRKHLAEVTLSVKADFPTPSISDFEIPSSNIRRIICSASGGFPEPHLSWLENGEELNAINTTVSQDPETELYAVSSKLDFNMTTNHSFMCLIKYGHLRVNQTFNWNTTKQEHFPDN

SEQ ID NO: 1460 - protein, 208 aa, Artificial Sequence
  CD80 v14 ECD
VIHVTKEVKEVATLSCGHNVSVEELAQTRIYWQKEKKMVLTMMSGDMNIWPEYKNRTIFDITSNLSIVIQALRPSDEGTYECVVLKYEKDGFKREHLAEVTLSVKADFPTPSISDFEIPSSNIRRIICSASGGFPEPHLSWLENGEELNAINTTVSQDPETELYAVSSKLDFNMTTNHSFMCLIKYGHLRVNQTFNWNTTKQEHFPDN

SEQ ID NO: 1461 - protein, 208 aa, Artificial Sequence
  CD80 v15 ECD
VIHVTKEVKEVATLSCGHNVSVEELAQTRIYWQKEEKMVLTMMSGDMNIWPEYKNRTIFDITNNLSTVIQALRPSDEGTYECVVLKYEKDGFKREHLAEVTLSVKADFPTPSISDFEIPSSNIRRIICSASGGFPEPHLSWLENGEELNAITTTVSQDPETELYAVSSKLDFNMTTNHSFMCLIKYGHLRVNQTFNWNTTKQEHFPDN

SEQ ID NO: 1462 - protein, 208 aa, Artificial Sequence
  CD80 v16 ECD
VIHVTKEVKEVATLSCGHNVSVEELAQTRIYWQKEKKMVLTMMSGDMNIWPGYKNRTIFDITNNLSIVIQALRPSDEGTYECVVLKYEKDGFKREHLAEVTLSVKADFPTPSISDFEIPSSNIRRIICSASGGFPEPHLSWLENGEELNAINTTVSQDPETELYAVSSKLDFNMTTNHSFMCLIKYGHLRVNQTFNWNTTKQEHFPDN

SEQ ID NO: 1463 - protein, 208 aa, Artificial Sequence
  CD80 v17 ECD
VIHVTKEVKEVATLSCGHNVSVEELAQTRIYWQKEKEMVLTMMSGDMNIWPEYKNRTISDITNNLSIVIQALRPSDEGTYECVVLKYEKDGFKREHLAEVTLSVKADFPTPSISDFEIPSSNIRRIICSASGGFPEPHLSWLENGEELNAINTTVSQDPETELYAVSSKLDFNMTTNHSFMCLIKYGHLRVNQTFNWNTTKQEHFPDN

SEQ ID NO: 1464 - protein, 208 aa, Artificial Sequence
  CD80 v18 ECD
VIHVTKEVKEVATLSCGHNVSVEELAQTRIYWQKEKKMVLTMMSGDMNIWPEYKNRTIFDITNNLSIVILALRPSDEGTYECVVLKYEKDGFKREHLAEVTLPVKADFPTPSISDFEIPTSNIRRIICSTSGGFPEPHLSWLENGEELNAINTTVSQDPETELYAVSSKLDFNMTTNHSFMCLIKYGHLRVNQTFNWNTTKQEHFPDN

SEQ ID NO: 1465 - protein, 208 aa, Artificial Sequence
  CD80 v19 ECD
VIHVTKEVKEVATLSCGHNVSVEELAQTRIYWQKEKKMVLTMMSGDMNIWPEYKNRTIFDITNNLSIVILALRPSDEGTYECVVLKYEEDAFKREHLAEVTLSVKADFPTPSISDFEIPTSNIRRIICSASGGFPEPHLSWLENGEELNAINTTVSQDPETELYAVSSKLDFNMTTNHSFMCLIKYGHLRVNQTFNWNTTKQEHFPDN

SEQ ID NO: 1466 - protein, 208 aa, Artificial Sequence
  CD80 v20 ECD
VIHVTKEVKEVATLSCGHNVSVEELAQTRIYWQKEKKMVLTMMSGDMNIWPEYKNRTIFDITNNLSIVILALRPSDEGTYECVVLKYEKDGFKREHLAEVTLSVKADFPTPSISDFEIPTSNIRRIICSTSGGFPEPHLSWLENGEELNAINTTVSQDPETELYAVSSKLDFNMTTNHSFMCLIKYGHLRVNQTFNWNTTKQEHFPDN

SEQ ID NO: 1467 - protein, 208 aa, Artificial Sequence
  CD80 v21 ECD
VIHVTKEVKEVATLSCGHNVSVEELAQTRIYWQKEKKMVLTMMSGDMNIWPEYKNRTIFVITNNLSIVILALRPSDEGTYECVVLKYEKDGFKREHLAEVTLSVKADFPTPSISDFEIPSSNIRRIICSASGGFPEPHLSWLENGEELNAINTTVSQDPETELYAVSSKLDFNMTTNHSFMCLIKYGHLRVNQTFNWNTTKQEHFPDN

SEQ ID NO: 1468 - protein, 208 aa, Artificial Sequence
  CD80 v22 ECD
VIHVTKEVKEVATLSCGHNVSVEELAQTRIYWQKEKKMVLTMMSGDMNIWPEYMNRTIFDITNNLSIVILALRPSDEGTYECVVLKYEKDGFKREHLAEVTLSVKADFPTPSISDFEIPSSNIRRIICSTSGGFPEPHLSWLENGEELNAINTTVSQDPETELYAVSSKLDFNMTTNHSFMCLIKYGHLRVNQTFNWNTTKQEHFPDN

SEQ ID NO: 1469 - protein, 208 aa, Artificial Sequence
  CD80 v23 ECD
VIHVTKEVKEVATLSCGHNVSVEELAQTRIYWQKEKKTVLTMMSGDMNIWPEYKNRTIFDITNNLSIVIQALRPSDGGTYECVVLKYEKDGFKREHLAEVTLSVKADFPTPSISDFEIPSSNIRRIICSASGGFPEPHLSWLENGEELNAITTTVSQDPETELYAVSSKLDFNMTTNHSFMCLIKYGHLRVNQTFNWNTTKQEHFPDN

SEQ ID NO: 1470 - protein, 208 aa, Artificial Sequence
  CD80 v24 ECD
VIHVTKEVKEVATLSCGHNVSVEELAQTHIYWQKEKKMVLTMMSGDMNIWPGYKNRTIFDITNNLSIVIRALRPSDEGTYECVVLKYGKDGFKREHLAEVTLSVKADFPTPSISDFEIPTSNIRRIICSASGGFPEPHLSWLENGEELNAINTTVSQDPETELYAVSSKLDFNMTTNHSFMCLIKYGHLRVNQTFNWNTTKQEHFPDN

SEQ ID NO: 1471 - protein, 208 aa, Artificial Sequence
  CD80 v25 ECD
VIHVTKEVKEVATLSCGHNVSVEELAQTRIHWQKEKKMVLGMMSGDMNIWPEYKNRTIFDITNNLSIVIQALRPSDEGTYECVVLKYEKDGFKREHLAEVTLSVKADFPTPSISDFEIPSSNIRRIICSASGGFPEPHLSWLENGEELNAINTTVSQDPETELYAVSSKLDFNMTTNHSFMCLIKYGHLRVNQTFNWNTTKQEHFPDN

SEQ ID NO: 1472 - protein, 208 aa, Artificial Sequence
  CD80 v26 ECD
VIHVTKEVKEVATLSCGHNVSVEELAQTRIYWQKEKKMVLTMMSGDMNIWPEYKNRTIFDITNNLSIAILALRPSDEGTYECVVLKYEKDAFKREHLAEVTLSVKADFPAPSISDFEIPTSNIRRIICSTSGGFPEPHLSWLENGEELNAINTTVSQDPETELYAVSSKLDFNMTTNHSFMCLIKYGHLRVNQTFNWNTTKQEHFPDN

SEQ ID NO: 1473 - protein, 208 aa, Artificial Sequence
  CD80 v27 ECD
VIHVTKEVKEVATLSCGHNVSVEELAQTRIYWQKEKKMVLTMMSGDMNIWPEYKNRTIFDITNNLHIVILALRPSDEGTYECVVLKYEKGAFKREHLAEVTLSVKADFPAPSISDLEIPTSNIRRIICSTSGGFPEPHLSWLENGEELNAINTTVSQDPETELYAVSSKLDFNMTTNHSFMCLIKYGHLRVNQTFNWNTTKQEHFPDN

SEQ ID NO: 1474 - protein, 208 aa, Artificial Sequence
  CD80 v28 ECD
VIHVTKEVKEVATLSCGHNVSVEELAQTHIYWQKEKKMVLTMMSGDMNIWPGYKNRTIFDITNNLSIVILALRPSDEGTYECVVLKYEKDAFKREHLAEVTLSVKADFPTPSISDFEIPSSNIRRIICSASGGFPEPHLSWLENGEELNAINTTVSQDPETELYAVSSKLDFNMTTNHSFMCLIKYGHLRVNQTFNWNTTKQEHFPDN

SEQ ID NO: 1475 - protein, 208 aa, Artificial Sequence
  CD80 v29 ECD
VIHVTKEVKEVATLSCGHNVSVEELAQTRIYWQKEKKMVLTMMSGDMNIWPEYKNRTIFDITNNLSIVILALRPSDEGTYECVVLKYEKDGFKREHLAEVTSSVKADFPTPSISDFEIPTSNIRRIICSTSGGFPEPHLSWLENGEELNAINTTVSQDPETELYAVSSKLDFNMTTNHSFMCLIKYGHLRVNQTFNWNTTKQEHFPDN

SEQ ID NO: 1476 - protein, 208 aa, Artificial Sequence
  CD80 v30 ECD
VIHVTKEVKEVATLSCGHNVSVEELAQTRIYWQKEKKMVLTMMSGDMNIWPEYKNRTIFDITNNLSTVIQALRPSDEGTYECVVLKYEKDGFKREHLAEVTLSVKADFPTPSISDFEIPSSNIRRIICSTSGGFPEPHLSWLENGEELNAINTTVSQDPETELYAVSSKLDFNMTTNHSFMCLIKYGHLRVNQTFNWNTTKQEHFPDN

SEQ ID NO: 1477 - protein, 208 aa, Artificial Sequence
  CD80 v31 ECD
VIHVTKEVKEVATLSCGHNVSVEELAQTRIYWQKEKKMVLTMMSGDMNIWPEYKNRTIFDITNNLSIVIQALRPSDEGTYECVVLKYEKDGFKREHLAEVTLSVKADFPAPSISDFEIPSSNIRRIICSASGGFPEPHLSWLENGEELNAINTTVSQDPETELYAVSSKLDFNMTTNHSFMCLIKYGHLRVNQTFNWNTTKQEHFPDN

SEQ ID NO: 1478 - protein, 208 aa, Artificial Sequence
  CD80 v32 ECD
VIHVTKEVKEVATLSCGHNVSVEELAQTRIYWQKEKKVVLDMISGDMNIGPEYKNRTIFDITNNLSIVILALRPSGEGTYECAVLKYEEDAFKREHLAEVTLSVKADFPTPSISDFEIPSSNIRRIICSASGGFPEPHLSWLENGEELNAINTTVSQDPETELYAVSSKLDFNMTTNHSFMCLIKYGHLRVNQTFNWNTTKQEHFPDN

SEQ ID NO: 1479 - protein, 208 aa, Artificial Sequence
  CD80 v33 ECD
VIHVTKEVKEVATLSCGHNVSAEELAQTRIYWQKEKKMVLTMMSGDMNIWPEYKNRTIFDITNNLSIVIQALRPSDEGTYECVVLKYEKDAFKREHLAEVTLSVKADFPTPSISDFEIPTPNIRRIICSTSGGFPEPHLSWLENGEELNAINTTVSQDPETELYAVSSKLDFNMTTNHSFMCLIKYGHLRVNQTFNWNTTKQEHFPDN

SEQ ID NO: 1480 - protein, 208 aa, Artificial Sequence
  CD80 v34 ECD
VIHVTKEVKEVVTLFCGHNVSVEELAQTRIHWQKEKKMVLGMMSGDMNIWPEYKNRTIFDITNNLSIVILALRPSDEGTYECVVLKYEKDAFKREHLAEVTLSVKADFPTPSISDFEIPTSNIRRIICSASGGFPELHLSWLENGEELNAITTTVSQDPETELYAVSSKLDFNMTTNHSFMCLIKYGHLRVNQTFNWNTTKQEHFPDN

SEQ ID NO: 1481 - protein, 208 aa, Artificial Sequence
  CD80 v35 ECD
VIHVTKEVKEVATLSCGHNVSVEELAQTRIYWQKEKKMVLTMMSGDMNIWPEYKNRTIFDITNNLSFVIRALRPSDEGTYECVVLKYGKDGFKREHLAEVTLSVKADFPTPSISDFEIPSSNIRRIICSASGGFPEPHLSWLENGEELNAINTTVSQDPETELYAVSSKLDFNMTTNHSFMCLIKYGHLRVNQTFNWNTTKQEHFPDN

SEQ ID NO: 1482 - protein, 208 aa, Artificial Sequence
  CD80 v36 ECD
VIHVTKEVKEVATLSCGHNVSVEGPAQTRIYWQKEKKMVLTMMSGDMNIWPEYKNRTIFDITNNLSIVIQALRPSDEGTYECVVLKYEKDAFKREHLAEVTLSVKADFPTPSISDFEIPSSNIRRIICSTSGGFPEPHLSWLENGEELNAINTTVSQDPETELYAVSSKLDFNMTTNHSFMCLIKYGHLRVNQTFNWNTTKQEHFPDN

SEQ ID NO: 1483 - protein, 208 aa, Artificial Sequence
  CD80 v37 ECD
VIHVTKEVKEVATLSCGHNVSVEELAQTRIYWQKEKKMVLTMMSGDMNIWPEYKNRTIFDITNNLSIVILALRPSDEGTYECVVLKYEKDGLKREHLAEVTLSVKADLPTPSISDFEIPSSNIRRIICSTSGGFPEPHLSWLENGEELNAINTTVSQDPETELYAVSSKLDFNMTTNHSFMCLIKYGHLRVNQTFNWNTTKQEHFPDN

SEQ ID NO: 1484 - protein, 208 aa, Artificial Sequence
  CD80 v38 ECD
VIHVTKEVKEVATLSCGHNVSVEELAQTDILWHKEGKIVLAMRSGDTNIWPEYKNRTIFDITNNLSIVILALRPSDEGTYVCVVRKYENDTPVLEHLAEVTLSVKADFPTPSISDFETPTSNIRRIICSTSGGFPEPHLSWLENGEELSAINTTVSQDPETELYAVSSKLDFNMTTNHSFMCLIKYGHLRVNQTFNWNTTKQEHFPDN

SEQ ID NO: 1485 - protein, 208 aa, Artificial Sequence
  CD80 v39 ECD
VIHVTKEVKEVATLSCGHNVSVEELAQTDILWHKEGKIVLAMRSGDTNIWPEYKNRTIFDITNNLSIVILALRPSDEGTYVCVVRKYENDTPVLEHLAEVTLSVKADFPTPSISDFEIPTSNIRRIICSTSGGFPEPHLSWLESGEELSAINTTVSQDPETELYAVSSKLDFNMTTNHSFMCLIKYGHLRVNQTFNWNTTKQEHFPDN

SEQ ID NO: 1486 - protein, 208 aa, Artificial Sequence
  CD80 v40 ECD
VIHVTKEVKEVATLSCGHNVSVEELAQTDILWHKEGKIVLATRSGDTNIWPEYKNRTIFDITNNLSIVILALRPSDEGTYVCVVRKYENDTPVLEHLAEVTLSVKADFPTPSISDFEIPTSNIRRIICSTSGGFPEPHLSWLENGEESSAINTTVSQDPETELYAVSSKLDFNMTTNHSFMCLIKYGHLRVNQTFNWNTTKQEHFPDN

SEQ ID NO: 1487 - protein, 208 aa, Artificial Sequence
  CD80 v41 ECD
VIHVTKEVKEVATLSCGHNVSVEGLAQTDILWHKEGKIVLAMRSGDTNIWPEYKNRTILDITNNLSIVILALRPSDEGTYVCVVRKYENDTPVLERLAEVTLSVKADFPTPSISDFEIPTSNIRRIICSTSGGFPEPHLSWLENGEELSAINTTVSQDPETELYAVSSKLDFNMTTNHSFMSLIKYGHLRVNQTFNWNTTKQEHFPDN

SEQ ID NO: 1488 - protein, 208 aa, Artificial Sequence
  CD80 v42 ECD
VIHVTKEVKEVATLSCGHNVSVEELAQTDILWHKEGKIVLAMRSGDTNIWPEYKNRTIFDITNNLSIVILALRPSDEGTYVCVVRKYENDTPVLEHLAEVTLSVKADFPTPSISDFEIPTSNIRRIICSTSGGFPEPHLSWLENGEELSAINTTVSQDPETELYAVSSKLDFNMTTNHSFMCLIKYGHLRVNQTFNWNTTKQEHFPDN

SEQ ID NO: 1489 - protein, 208 aa, Artificial Sequence
  CD80 v43 ECD
VIHVTKEVKEVATLSCGHNVSVEELAQTVIYWQKEKKMVLTMQSGDMNIWPEYKNRTIFDITNNLSIVILALRPSDEGTYRCVVIKYERLENQGEHLAEVTLSVKADFPTPSISDFEIPTSNIRRIICSTSGGFPEPHLSWLENGEELNAINTTVSQDPETELYAVSSKLDFNMTTNHSFMCLIKYGHLRVNQTFNWNTTKQEHFPDN

SEQ ID NO: 1490 - protein, 208 aa, Artificial Sequence
  CD80 v44 ECD
VIHVTKEVKEVATLSCGHNVSVEELAQTRIYWQKEKKMVLIMMSGDMNIWPEYKNRTIFDITNNLSIVILALRPSDEGTYECVVLKYEKDGFKREHLAEVTLSVKADFPTPSISDFEIPTSNIRRIICSTSGGFPEPHLSWLENGEELNAINTTVSQDPETELYAVSSKLDFNMTTNHSFMCLIKYGHLRVNQTFNWNTTKQEHFPDN

SEQ ID NO: 1491 - protein, 208 aa, Artificial Sequence
  CD80 v45 ECD
VIHVTKEVKEVATLSCGHNVSVEELAQTRIYWQKEKKMVLTMMSGDMNIWPEYKNRTIFDITNNLSIVILALRPSDEGTYECVVLKYERKGYRREHLAEVTLSVKADFPTPSISDFEIPTSSIRRIICSTSGGFPEPHLSWLENGEELNAINTTVSQDPETELYAVSSKLDFNMTTSHSFMCLIKYGHLRVNQTFNWNTTKQEHFPDN

SEQ ID NO: 1492 - protein, 208 aa, Artificial Sequence
  CD80 v46 ECD
VIHVTKEVKEVATLSCGHNVSVEELAQTRIYWQKEKKMVLTMMSGDMNIWPEYKNRTIFDITNNLSIVILALRPSDEGTYECVVLKYERKGYRREHLAEVTLSVKADFPTPSISDFEIPTSNIRRIICSTSGGFPEPHLSWLENGEELNAINTTVSQDPETELYAVSSKLDFNMTTNHSFMCLIKYGHLRVNQTFNWNTTKQEHFPDN

SEQ ID NO: 1493 - protein, 208 aa, Artificial Sequence
  CD80 v47 ECD
VIHVTKEVKEVATLSCGHNVSVEELAQTRIYWQKEGQIVLTMMSGDMNIWPEYKNRTILDITNNLSIVILALRPSDEGTYVCVVRKYENDTPVLEHLAGVTLSVKADFPTPSISDFEIPTSNIRRIICSASGGFPEPHLSWLENGEELSAINTTVSQDPETELYAVSSKLDFNMTTNHSFMCLIKYGHLRVNQTFNWNTTKQEHFPDN

SEQ ID NO: 1494 - protein, 208 aa, Artificial Sequence
  CD80 v48 ECD
VIHVTKEVKEVATLSCGHNVSVEELAQTRIYWQKEKKMVLTMMSGDMNIWPEYKNRTIFDITNNLSIVILALRPSDEGTYECVVLKYDRKGYRREHLAEVTLSVKADFPTPSISDFEIPTSNIRRIICSTSGGFPEPHLSWLENGEELNAINTTVSQDPETELYAVSSKLDFNMTTNHSFMCLIKYGHLRVNQTFNWNTTKQEHFPDN

SEQ ID NO: 1495 - protein, 208 aa, Artificial Sequence
  CD80 v49 ECD
VIHVTKEVKEVATLSCGHNVSVEELAQTRIYWQKEGQIVMTMMSGDMNIWPEYKNRTIFDITNNLSIVILALRPSDEGTYECVVLKYEKDAFKREHLAEVTLSVKADFPTPSISDFEIPTSNIRRIICSTSGGFPEPHLSWLENGEELNAINTTVSQDPETELYAVSSKLDFNMTTNHSFMCLIKYGHLRVNQTFNWNTTKQEHFPDN

SEQ ID NO: 1496 - protein, 208 aa, Artificial Sequence
  CD80 v50 ECD
VIHVTKEVKEVATLSCGHNVSVEELAQTRIYWQKEGKMVLTMMSGDMNIWPEYKNRTIFDITNNLSIVILALRPSDEGTYECVVLKYEKDAFKREHLAEVTLSVKADFPTPSISDFEIPTSNIRRIICSTSGGFPEPHLSWLENGEELNAINTTVSQDPETELYAVSSKLDFNMTTNHSFMCLIKYGHLRVNQTFNWNTTKQEHFPDN

SEQ ID NO: 1497 - protein, 208 aa, Artificial Sequence
  CD80 v51 ECD
VIHVTKEVKEVATLSCGHNVSVEELAQTHIHWQKEKKMVLGMMSGDMNIWPEYKNRTIFDITNNLSIVILALRPSDEGTYECVVLKNGENGFKREHLAEVTLSVKADFSTPSISDFEIPTSNIRRIICSTSGGFPEPHLSWLENGEELNAINTTVSQDPETELYAVSSKLDFNMTTNHSFMCLIKYGHLRVNQTFNWNTTKQEHFPDN

SEQ ID NO: 1498 - protein, 208 aa, Artificial Sequence
  CD80 v52 ECD
VIHVTKEVKEVTTLSCGLNVSVEELAQTRIYWQKEKKMVLTMVSGDMNIWPEYKNRTILDITNNLSIVILALRPSDKGTYECVVLKYEKDAFKREHLAEVTLSVKADFSTPSISDFETPTSNIRRIICSTSGGFPEPHLSWLENGEELNAINTTVSQDPETELYAVSSKLDFNMTTNHSFMCLIKYGHLRVNQTFNWNTTKQEHFPDN

SEQ ID NO: 1499 - protein, 208 aa, Artificial Sequence
  CD80 v53 ECD
VIHVTKEVKEVATLSCGHNVSVEELAQTVIFWQKEGKLVLTMQSGDMNIWPEYKNRTIFDITNNLSIVILALRPSDEGTYRCIVIKYERLENQGEHLAEVTLSVKADFPTPSISDFEIPTSNIRRIICSTSGGFPEPHLSWLENGEELNAINTTVSQDPETELYAVSSKLDFNMTTNHSFMCLIKYGHLRVNQTFNWNTTKQEHFPDN

SEQ ID NO: 1500 - protein, 208 aa, Artificial Sequence
  CD80 v54 ECD
VIHVTKEVKEVATLSCGHNVSVEELAQTRIYWQKEKKMVLTMMSGDMNIWPEYKNRTIFDITNNLSIMIPAPRPSDEGTYECVVLEYEKDAFKREHLAEVTLSVKADFPTPSISDFEIPTSNIRRIICSTSGGFPEPHLSWLENGEELNAINTTVSQDPETELYAVSSKLDFNMTTNHSFMCLIKYGHLRVNQTFNWNTTKQEHFPDN

SEQ ID NO: 1501 - protein, 19 aa, Artificial Sequence
  VH signal peptide
MGSTAILALLLAVLQGVSA

SEQ ID NO: 1502 - protein, 232 aa, Artificial Sequence
  IgG1 Fc
EPKSCDKTHTCPPCPAPELLGGPSVFLFPPKPKDTLMISRTPEVTCVVVDVSHEDPEVKFNWYVDGVEVHNAKTKPREEQYNSTYRVVSVLTVLHQDWLNGKEYKCKVSNKALPAPIEKTISKAKGQPREPQVYTLPPSREEMTKNQVSLTCLVKGFYPSDIAVEWESNGQPENNYKTTPPVLDSDGSFFLYSKLTVDKSRWQQGNVFSCSVMHEALHNHYTQKSLSLSPGK

SEQ ID NO: 1503 - protein, 235 aa, Artificial Sequence
  IgG2 Fc
TKVDKTVERKCCVECPPCPAPPVAGPSVFLFPPKPKDTLMISRTPEVTCVVVDVSHEDPEVQFNWYVDGVEVHNAKTKPREEQFNSTFRVVSVLTVVHQDWLNGKEYKCKVSNKGLPAPIEKTISKTKGQPREPQVYTLPPSREEMTKNQVSLTCLVKGFYPSDIAVEWESNGQPENNYKTTPPMLDSDGSFFLYSKLTVDKSRWQQGNVFSCSVMHEALHNHYTQKSLSLSPGK

SEQ ID NO: 1504 - protein, 15 aa, Artificial Sequence
  Linker
GGGGSGGGGSGGGGS

SEQ ID NO: 1505 - protein, 10 aa, Artificial Sequence
  Linker
GGGGSGGGGS

SEQ ID NO: 1506 - protein, 13 aa, Artificial Sequence
  Linker
GGGGSGGGGSAAA

SEQ ID NO: 1507 - protein, 232 aa, Artificial Sequence
  Fc (C5S (C220S), R77C, (R292C),  N82G (N297G), V87C (V302C))
EPKSSDKTHTCPPCPAPELLGGPSVFLFPPKPKDTLMISRTPEVTCVVVDVSHEDPEVKFNWYVDGVEVHNAKTKPCEEQYGSTYRCVSVLTVLHQDWLNGKEYKCKVSNKALPAPIEKTISKAKGQPREPQVYTLPPSREEMTKNQVSLTCLVKGFYPSDIAVEWESNGQPENNYKTTPPVLDSDGSFFLYSKLTVDKSRWQQGNVFSCSVMHEALHNHYTQKSLSLSPGK

SEQ ID NO: 1508 - protein, 232 aa, Artificial Sequence
  Fc with C220S/L234A/L235E/G237A
EPKSSDKTHTCPPCPAPEAEGAPSVFLFPPKPKDTLMISRTPEVTCVVVDVSHEDPEVKFNWYVDGVEVHNAKTKPREEQYNSTYRVVSVLTVLHQDWLNGKEYKCKVSNKALPAPIEKTISKAKGQPREPQVYTLPPSREEMTKNQVSLTCLVKGFYPSDIAVEWESNGQPENNYKTTPPVLDSDGSFFLYSKLTVDKSRWQQGNVFSCSVMHEALHNHYTQKSLSLSPGK

SEQ ID NO: 1509 - protein, 231 aa, Artificial Sequence
  Fc with C220S/E233P/L234V/L235A/G236del/S267K
EPKSSDKTHTCPPCPAPPVAGPSVFLFPPKPKDTLMISRTPEVTCVVVDVKHEDPEVKFNWYVDGVEVHNAKTKPREEQYNSTYRVVSVLTVLHQDWLNGKEYKCKVSNKALPAPIEKTISKAKGQPREPQVYTLPPSREEMTKNQVSLTCLVKGFYPSDIAVEWESNGQPENNYKTTPPVLDSDGSFFLYSKLTVDKSRWQQGNVFSCSVMHEALHNHYTQKSLSLSPGK

SEQ ID NO: 1510 - protein, 231 aa, Artificial Sequence
  IgG1 Fc
EPKSCDKTHTCPPCPAPELLGGPSVFLFPPKPKDTLMISRTPEVTCVVVDVSHEDPEVKFNWYVDGVEVHNAKTKPREEQYNSTYRVVSVLTVLHQDWLNGKEYKCKVSNKALPAPIEKTISKAKGQPREPQVYTLPPSREEMTKNQVSLTCLVKGFYPSDIAVEWESNGQPENNYKTTPPVLDSDGSFFLYSKLTVDKSRWQQGNVFSCSVMHEALHNHYTQKSLSLSPG

SEQ ID NO: 1511 - protein, 232 aa, Artificial Sequence
  Knob Fc
EPKSSDKTHTCPPCPAPEAEGAPSVFLFPPKPKDTLMISRTPEVTCVVVDVSHEDPEVKFNWYVDGVEVHNAKTKPREEQYNSTYRVVSVLTVLHQDWLNGKEYKCKVSNKALPAPIEKTISKAKGQPREPQVYTLPPCREEMTKNQVSLWCLVKGFYPSDIAVEWESNGQPENNYKTTPPVLDSDGSFFLYSKLTVDKSRWQQGNVFSCSVMHEALHNHYTQKSLSLSPGK

SEQ ID NO: 1512 - protein, 232 aa, Artificial Sequence
  Hole Fc
EPKSSDKTHTCPPCPAPEAEGAPSVFLFPPKPKDTLMISRTPEVTCVVVDVSHEDPEVKFNWYVDGVEVHNAKTKPREEQYNSTYRVVSVLTVLHQDWLNGKEYKCKVSNKALPAPIEKTISKAKGQPREPQVCTLPPSREEMTKNQVSLSCAVKGFYPSDIAVEWESNGQPENNYKTTPPVLDSDGSFFLVSKLTVDKSRWQQGNVFSCSVMHEALHNHYTQKSLSLSPGK

SEQ ID NO: 1513 - protein, 232 aa, Artificial Sequence
  Fc with C220S/L234A/L235E/G237A/E356D/M358L
EPKSSDKTHTCPPCPAPEAEGAPSVFLFPPKPKDTLMISRTPEVTCVVVDVSHEDPEVKFNWYVDGVEVHNAKTKPREEQYNSTYRVVSVLTVLHQDWLNGKEYKCKVSNKALPAPIEKTISKAKGQPREPQVYTLPPSRDELTKNQVSLTCLVKGFYPSDIAVEWESNGQPENNYKTTPPVLDSDGSFFLYSKLTVDKSRWQQGNVFSCSVMHEALHNHYTQKSLSLSPGK

SEQ ID NO: 1514 - protein, 8 aa, Artificial Sequence
  Stuffer
HMSSVSAQ

SEQ ID NO: 1515 - protein, 229 aa, Artificial Sequence
  IgG4 Fc
ESKYGPPCPSCPAPEFLGGPSVFLFPPKPKDTLMISRTPEVTCVVVDVSQEDPEVQFNWYVDGVEVHNAKTKPREEQFNSTYRVVSVLTVLHQDWLNGKEYKCKVSNKGLPSSIEKTISKAKGQPREPQVYTLPPSQEEMTKNQVSLTCLVKGFYPSDIAVEWESNGQPENNYKTTPPVLDSDGSFFLYSRLTVDKSRWQEGNVFSCSVMHEALHNHYTQKSLSLSLGK

SEQ ID NO: 1516 - protein, 229 aa, Artificial Sequence
  IgG4 Fc S228P
ESKYGPPCPPCPAPEFLGGPSVFLFPPKPKDTLMISRTPEVTCVVVDVSQEDPEVQFNWYVDGVEVHNAKTKPREEQFNSTYRVVSVLTVLHQDWLNGKEYKCKVSNKGLPSSIEKTISKAKGQPREPQVYTLPPSQEEMTKNQVSLTCLVKGFYPSDIAVEWESNGQPENNYKTTPPVLDSDGSFFLYSRLTVDKSRWQEGNVFSCSVMHEALHNHYTQKSLSLSLGK

SEQ ID NO: 1517 - protein, 232 aa, Artificial Sequence
  IgG1 Fc C220S
EPKSSDKTHTCPPCPAPELLGGPSVFLFPPKPKDTLMISRTPEVTCVVVDVSHEDPEVKFNWYVDGVEVHNAKTKPREEQYNSTYRVVSVLTVLHQDWLNGKEYKCKVSNKALPAPIEKTISKAKGQPREPQVYTLPPSREEMTKNQVSLTCLVKGFYPSDIAVEWESNGQPENNYKTTPPVLDSDGSFFLYSKLTVDKSRWQQGNVFSCSVMHEALHNHYTQKSLSLSPGK

SEQ ID NO: 1518 - protein, 231 aa, Artificial Sequence
  Fc with C220S/L234A/L235E/G237A/E356D/M358L/K447del
EPKSSDKTHTCPPCPAPEAEGAPSVFLFPPKPKDTLMISRTPEVTCVVVDVSHEDPEVKFNWYVDGVEVHNAKTKPREEQYNSTYRVVSVLTVLHQDWLNGKEYKCKVSNKALPAPIEKTISKAKGQPREPQVYTLPPSRDELTKNQVSLTCLVKGFYPSDIAVEWESNGQPENNYKTTPPVLDSDGSFFLYSKLTVDKSRWQQGNVFSCSVMHEALHNHYTQKSLSLSPG

SEQ ID NO: 1519 - protein, 231 aa, Artificial Sequence
  Fc (C5S (C220S), R77C, (R292C),  N82G (N297G), V87C (V302C), K232del (K447del))
EPKSSDKTHTCPPCPAPELLGGPSVFLFPPKPKDTLMISRTPEVTCVVVDVSHEDPEVKFNWYVDGVEVHNAKTKPCEEQYGSTYRCVSVLTVLHQDWLNGKEYKCKVSNKALPAPIEKTISKAKGQPREPQVYTLPPSREEMTKNQVSLTCLVKGFYPSDIAVEWESNGQPENNYKTTPPVLDSDGSFFLYSKLTVDKSRWQQGNVFSCSVMHEALHNHYTQKSLSLSPG

SEQ ID NO: 1520 - protein, 231 aa, Artificial Sequence
  Fc with C220S/L234A/L235E/G237A/K447del
EPKSSDKTHTCPPCPAPEAEGAPSVFLFPPKPKDTLMISRTPEVTCVVVDVSHEDPEVKFNWYVDGVEVHNAKTKPREEQYNSTYRVVSVLTVLHQDWLNGKEYKCKVSNKALPAPIEKTISKAKGQPREPQVYTLPPSREEMTKNQVSLTCLVKGFYPSDIAVEWESNGQPENNYKTTPPVLDSDGSFFLYSKLTVDKSRWQQGNVFSCSVMHEALHNHYTQKSLSLSPG

SEQ ID NO: 1521 - protein, 230 aa, Artificial Sequence
  Fc with C220S/E233P/L234V/L235A/G236del/S267K/K447del
EPKSSDKTHTCPPCPAPPVAGPSVFLFPPKPKDTLMISRTPEVTCVVVDVKHEDPEVKFNWYVDGVEVHNAKTKPREEQYNSTYRVVSVLTVLHQDWLNGKEYKCKVSNKALPAPIEKTISKAKGQPREPQVYTLPPSREEMTKNQVSLTCLVKGFYPSDIAVEWESNGQPENNYKTTPPVLDSDGSFFLYSKLTVDKSRWQQGNVFSCSVMHEALHNHYTQKSLSLSPG

SEQ ID NO: 1522 - protein, 7 aa, Artificial Sequence
  Linker
GSGGGGS

SEQ ID NO: 1523 - protein, 5 aa, Artificial Sequence
  Linker
GGGGS

SEQ ID NO: 1524 - protein, 45 aa, Artificial Sequence
  Moiety - COMP
DLGPQMLRELQETNAALQDVRELLRQQVREITFLKNTVMECDACG

SEQ ID NO: 1525 - protein, 33 aa, Artificial Sequence
  Moiety - VASP
DLQRVKQELLEEVKKELQKVKEEIIEAFVQELR

SEQ ID NO: 1526 - protein, 40 aa, Artificial Sequence
  Moiety - ZZ12.6
DVQAISSTIQDLQDQVDSLAEVVLQNRRGLDLLTRSGGGS

SEQ ID NO: 1527 - protein, 231 aa, Artificial Sequence
  Fc with C220S/E356D/M358L/K447del
EPKSSDKTHTCPPCPAPELLGGPSVFLFPPKPKDTLMISRTPEVTCVVVDVSHEDPEVKFNWYVDGVEVHNAKTKPREEQYNSTYRVVSVLTVLHQDWLNGKEYKCKVSNKALPAPIEKTISKAKGQPREPQVYTLPPSRDELTKNQVSLTCLVKGFYPSDIAVEWESNGQPENNYKTTPPVLDSDGSFFLYSKLTVDKSRWQQGNVFSCSVMHEALHNHYTQKSLSLSPG

SEQ ID NO: 1528 - DNA, 1458 bp, Artificial Sequence
  Multivalent Polypeptide 1
atggggtcaaccgccatcctcgccctcctcctggctgttctccaaggagtcagcgctgttatccacgtgaccaaggaagtgaaagaagtggcaacgctgtcgtgtggttacaatgtttctgttgaagagctggaacaaactcgcatctactggcaaaaggataagaaaatggtgctgactatgatgtctggggacttgaatatatggcccgagtacaagaaccggaccatctttgatatcactaataacctctccattatgatcctgggtctgcgcccatctgacgagggcacatacgagtgtgttgttctgaagtatgaaaaaggcgctttcaagcgggaacacctggctgaagtgacgttatcagtcaaagctgacggatccggtggaggagggtcagagcccaaaagctccgacaagactcacacatgccccccttgtccagcgcctgaagctgagggtgcgccctctgtcttccttttcccccctaagccgaaagataccctgatgatctcccgcactcccgaagtcacatgtgttgttgtcgacgtatctcatgaagatcctgaggtgaaattcaactggtatgtagacggggtcgaagttcataatgctaagactaagccacgagaagagcaatacaactcaacgtatcgggtggtgagcgttctgacggttctgcaccaagattggcttaatggaaaagagtataagtgcaaggtgtccaacaaggctcttccggcacccatcgaaaagacgatttccaaagcgaaaggccaacctagggaaccgcaagtttacactttgcccccgtcaagagacgaacttaccaagaatcaagtttccctgacgtgccttgtgaagggcttctaccctagcgatatagcagttgagtgggaatctaacggccagcccgaaaataattataagactactccgcccgtgctggacagtgatggttcatttttcctgtattcaaaactcactgtggacaaatctagatggcagcagggtaatgtgttctcttgttcagttatgcacgaggcattgcacaatcactatacgcaaaaaagtttgtctctctctccggggggaggtggtggatcaggcggtggaggttccggaggaggtggatctgtgattcatgtcactaaagaagtcaaagaagtcgcaacactgtcctgtggctacaatgtcagcgtggaagaactggagcagacccgtatctactggcagaaggacaagaagatggtgctgaccatgatgtctggcgatctgaacatctggcccgagtataagaataggaccatcttcgacatcacaaacaatctgtccatcatgatcctgggcctgcggcctagcgatgagggaacatacgagtgcgtggtgctgaagtatgagaaaggggcattcaaacgagaacatctggctgaggtcacactgagcgtcaaggctgat

SEQ ID NO: 1529 - protein, 467 aa, Artificial Sequence
  Multivalent Polypeptide 1
VIHVTKEVKEVATLSCGYNVSVEELEQTRIYWQKDKKMVLTMMSGDLNIWPEYKNRTIFDITNNLSIMILGLRPSDEGTYECVVLKYEKGAFKREHLAEVTLSVKADGSGGGGSEPKSSDKTHTCPPCPAPEAEGAPSVFLFPPKPKDTLMISRTPEVTCVVVDVSHEDPEVKFNWYVDGVEVHNAKTKPREEQYNSTYRVVSVLTVLHQDWLNGKEYKCKVSNKALPAPIEKTISKAKGQPREPQVYTLPPSRDELTKNQVSLTCLVKGFYPSDIAVEWESNGQPENNYKTTPPVLDSDGSFFLYSKLTVDKSRWQQGNVFSCSVMHEALHNHYTQKSLSLSPGGGGGSGGGGSGGGGSVIHVTKEVKEVATLSCGYNVSVEELEQTRIYWQKDKKMVLTMMSGDLNIWPEYKNRTIFDITNNLSIMILGLRPSDEGTYECVVLKYEKGAFKREHLAEVTLSVKAD

SEQ ID NO: 1530 - DNA, 1458 bp, Artificial Sequence
  Multivalent Polypeptide 2
atggggtcaaccgccatcctcgccctcctcctggctgttctccaaggagtcagcgctgttatccacgtgaccaaggaagtgaaagaagtggcaacgctgtcgtgtggttacaatgtttctgttgaagagctggaacaaactcgcatctactggcaaaaggataagaaaatggtgctgactatgatgtctggggacttgaatatatggcccgagtacaagaaccggaccatctttgatatcactaataacctctccattatgatcctgggtctgcgcccatctgacgagggcacatacgagtgtgttgttctgaagtatgaaaaaggcgctttcaagcgggaacacctggctgaagtgacgttatcagtcaaagctgacggatccggtggaggagggtcagagcccaaaagctccgacaagactcacacatgccccccttgtccagcgcctgaactcctgggtggaccctctgtcttccttttcccccctaagccgaaagataccctgatgatctcccgcactcccgaagtcacatgtgttgttgtcgacgtatctcatgaagatcctgaggtgaaattcaactggtatgtagacggggtcgaagttcataatgctaagactaagccacgagaagagcaatacaactcaacgtatcgggtggtgagcgttctgacggttctgcaccaagattggcttaatggaaaagagtataagtgcaaggtgtccaacaaggctcttccggcacccatcgaaaagacgatttccaaagcgaaaggccaacctagggaaccgcaagtttacactttgcccccgtcaagagacgaacttaccaagaatcaagtttccctgacgtgccttgtgaagggcttctaccctagcgatatagcagttgagtgggaatctaacggccagcccgaaaataattataagactactccgcccgtgctggacagtgatggttcatttttcctgtattcaaaactcactgtggacaaatctagatggcagcagggtaatgtgttctcttgttcagttatgcacgaggcattgcacaatcactatacgcaaaaaagtttgtctctctctccggggggaggtggtggatcaggcggtggaggttccggaggaggtggatctgtgattcatgtcactaaagaagtcaaagaagtcgcaacactgtcctgtggctacaatgtcagcgtggaagaactggagcagacccgtatctactggcagaaggacaagaagatggtgctgaccatgatgtctggcgatctgaacatctggcccgagtataagaataggaccatcttcgacatcacaaacaatctgtccatcatgatcctgggcctgcggcctagcgatgagggaacatacgagtgcgtggtgctgaagtatgagaaaggggcattcaaacgagaacatctggctgaggtcacactgagcgtcaaggctgat

SEQ ID NO: 1531 - protein, 467 aa, Artificial Sequence
  Multivalent Polypeptide 2
VIHVTKEVKEVATLSCGYNVSVEELEQTRIYWQKDKKMVLTMMSGDLNIWPEYKNRTIFDITNNLSIMILGLRPSDEGTYECVVLKYEKGAFKREHLAEVTLSVKADGSGGGGSEPKSSDKTHTCPPCPAPELLGGPSVFLFPPKPKDTLMISRTPEVTCVVVDVSHEDPEVKFNWYVDGVEVHNAKTKPREEQYNSTYRVVSVLTVLHQDWLNGKEYKCKVSNKALPAPIEKTISKAKGQPREPQVYTLPPSRDELTKNQVSLTCLVKGFYPSDIAVEWESNGQPENNYKTTPPVLDSDGSFFLYSKLTVDKSRWQQGNVFSCSVMHEALHNHYTQKSLSLSPGGGGGSGGGGSGGGGSVIHVTKEVKEVATLSCGYNVSVEELEQTRIYWQKDKKMVLTMMSGDLNIWPEYKNRTIFDITNNLSIMILGLRPSDEGTYECVVLKYEKGAFKREHLAEVTLSVKAD

SEQ ID NO: 1532 - DNA, 1458 bp, Artificial Sequence
  Multivalent Polypeptide 3
atggggtcaaccgccatcctcgccctcctcctggctgttctccaaggagtcagcgctgtgattcatgtcactaaagaagtcaaagaagtcgcaacactgtcctgtggctacaatgtcagcgtggaagaactggagcagacccgtatctactggcagaaggacaagaagatggtgctgaccatgatgtctggcgatctgaacatctggcccgagtataagaataggaccatcttcgacatcacaaacaatctgtccatcatgatcctgggcctgcggcctagcgatgagggaacatacgagtgcgtggtgctgaagtatgagaaaggggcattcaaacgagaacatctggctgaggtcacactgagcgtcaaggctgatggaggtggtggatcaggcggtggaggttccggaggaggtggatctgttatccacgtgaccaaggaagtgaaagaagtggcaacgctgtcgtgtggttacaatgtttctgttgaagagctggaacaaactcgcatctactggcaaaaggataagaaaatggtgctgactatgatgtctggggacttgaatatatggcccgagtacaagaaccggaccatctttgatatcactaataacctctccattatgatcctgggtctgcgcccatctgacgagggcacatacgagtgtgttgttctgaagtatgaaaaaggcgctttcaagcgggaacacctggctgaagtgacgttatcagtcaaagctgacggatccggtggaggagggtcagagcccaaaagctccgacaagactcacacatgccccccttgtccagcgcctgaagctgagggtgcgccctctgtcttccttttcccccctaagccgaaagataccctgatgatctcccgcactcccgaagtcacatgtgttgttgtcgacgtatctcatgaagatcctgaggtgaaattcaactggtatgtagacggggtcgaagttcataatgctaagactaagccacgagaagagcaatacaactcaacgtatcgggtggtgagcgttctgacggttctgcaccaagattggcttaatggaaaagagtataagtgcaaggtgtccaacaaggctcttccggcacccatcgaaaagacgatttccaaagcgaaaggccaacctagggaaccgcaagtttacactttgcccccgtcaagagacgaacttaccaagaatcaagtttccctgacgtgccttgtgaagggcttctaccctagcgatatagcagttgagtgggaatctaacggccagcccgaaaataattataagactactccgcccgtgctggacagtgatggttcatttttcctgtattcaaaactcactgtggacaaatctagatggcagcagggtaatgtgttctcttgttcagttatgcacgaggcattgcacaatcactatacgcaaaaaagtttgtctctctctccgggg

SEQ ID NO: 1533 - protein, 467 aa, Artificial Sequence
  Multivalent Polypeptide 3
VIHVTKEVKEVATLSCGYNVSVEELEQTRIYWQKDKKMVLTMMSGDLNIWPEYKNRTIFDITNNLSIMILGLRPSDEGTYECVVLKYEKGAFKREHLAEVTLSVKADGGGGSGGGGSGGGGSVIHVTKEVKEVATLSCGYNVSVEELEQTRIYWQKDKKMVLTMMSGDLNIWPEYKNRTIFDITNNLSIMILGLRPSDEGTYECVVLKYEKGAFKREHLAEVTLSVKADGSGGGGSEPKSSDKTHTCPPCPAPEAEGAPSVFLFPPKPKDTLMISRTPEVTCVVVDVSHEDPEVKFNWYVDGVEVHNAKTKPREEQYNSTYRVVSVLTVLHQDWLNGKEYKCKVSNKALPAPIEKTISKAKGQPREPQVYTLPPSRDELTKNQVSLTCLVKGFYPSDIAVEWESNGQPENNYKTTPPVLDSDGSFFLYSKLTVDKSRWQQGNVFSCSVMHEALHNHYTQKSLSLSPG

SEQ ID NO: 1534 - DNA, 1458 bp, Artificial Sequence
  Multivalent Polypeptide 4
atggggtcaaccgccatcctcgccctcctcctggctgttctccaaggagtcagcgctgtgattcatgtcactaaagaagtcaaagaagtcgcaacactgtcctgtggctacaatgtcagcgtggaagaactggagcagacccgtatctactggcagaaggacaagaagatggtgctgaccatgatgtctggcgatctgaacatctggcccgagtataagaataggaccatcttcgacatcacaaacaatctgtccatcatgatcctgggcctgcggcctagcgatgagggaacatacgagtgcgtggtgctgaagtatgagaaaggggcattcaaacgagaacatctggctgaggtcacactgagcgtcaaggctgatggaggtggtggatcaggcggtggaggttccggaggaggtggatctgttatccacgtgaccaaggaagtgaaagaagtggcaacgctgtcgtgtggttacaatgtttctgttgaagagctggaacaaactcgcatctactggcaaaaggataagaaaatggtgctgactatgatgtctggggacttgaatatatggcccgagtacaagaaccggaccatctttgatatcactaataacctctccattatgatcctgggtctgcgcccatctgacgagggcacatacgagtgtgttgttctgaagtatgaaaaaggcgctttcaagcgggaacacctggctgaagtgacgttatcagtcaaagctgacggatccggtggaggagggtcagagcccaaaagctccgacaagactcacacatgccccccttgtccagcgcctgaactcctgggtggaccctctgtcttccttttcccccctaagccgaaagataccctgatgatctcccgcactcccgaagtcacatgtgttgttgtcgacgtatctcatgaagatcctgaggtgaaattcaactggtatgtagacggggtcgaagttcataatgctaagactaagccacgagaagagcaatacaactcaacgtatcgggtggtgagcgttctgacggttctgcaccaagattggcttaatggaaaagagtataagtgcaaggtgtccaacaaggctcttccggcacccatcgaaaagacgatttccaaagcgaaaggccaacctagggaaccgcaagtttacactttgcccccgtcaagagacgaacttaccaagaatcaagtttccctgacgtgccttgtgaagggcttctaccctagcgatatagcagttgagtgggaatctaacggccagcccgaaaataattataagactactccgcccgtgctggacagtgatggttcatttttcctgtattcaaaactcactgtggacaaatctagatggcagcagggtaatgtgttctcttgttcagttatgcacgaggcattgcacaatcactatacgcaaaaaagtttgtctctctctccgggg

SEQ ID NO: 1535 - protein, 467 aa, Artificial Sequence
  Multivalent Polypeptide 4
VIHVTKEVKEVATLSCGYNVSVEELEQTRIYWQKDKKMVLTMMSGDLNIWPEYKNRTIFDITNNLSIMILGLRPSDEGTYECVVLKYEKGAFKREHLAEVTLSVKADGGGGSGGGGSGGGGSVIHVTKEVKEVATLSCGYNVSVEELEQTRIYWQKDKKMVLTMMSGDLNIWPEYKNRTIFDITNNLSIMILGLRPSDEGTYECVVLKYEKGAFKREHLAEVTLSVKADGSGGGGSEPKSSDKTHTCPPCPAPELLGGPSVFLFPPKPKDTLMISRTPEVTCVVVDVSHEDPEVKFNWYVDGVEVHNAKTKPREEQYNSTYRVVSVLTVLHQDWLNGKEYKCKVSNKALPAPIEKTISKAKGQPREPQVYTLPPSRDELTKNQVSLTCLVKGFYPSDIAVEWESNGQPENNYKTTPPVLDSDGSFFLYSKLTVDKSRWQQGNVFSCSVMHEALHNHYTQKSLSLSPG

SEQ ID NO: 1536 - protein, 254 aa, Homo sapiens
  MISC_FEATURE: Mature CD80(B7-1)
VIHVTKEVKEVATLSCGHNVSVEELAQTRIYWQKEKKMVLTMMSGDMNIWPEYKNRTIFDITNNLSIVILALRPSDEGTYECVVLKYEKDAFKREHLAEVTLSVKADFPTPSISDFEIPTSNIRRIICSTSGGFPEPHLSWLENGEELNAINTTVSQDPETELYAVSSKLDFNMTTNHSFMCLIKYGHLRVNQTFNWNTTKQEHFPDNLLPSWAITLISVNGIFVICCLTYCFAPRCRERRRNERLRRESVRPV

SEQ ID NO: 1537 - protein, 208 aa, Artificial Sequence
  CD80 v535 ECD
VIHVTKEVKEVATLSCGHNVSVEELAQTRIYWQKEKKMVLTMMSGDMNIWPEYKNRTIFDITNNLSTVIQALRPSDEGTYECVVLKYEKDGFKREHLAEVTLSVKADFPTPSISDFEVPSSNIRRIICSASGGFPEPHLSWLENGEELNAINTTVSQDPETELYAVSSKLDFNMTTNHSFMCLIKYGHLRVNQTFNWNTTKQEHFPDN

SEQ ID NO: 1538 - protein, 101 aa, Artificial Sequence; identical to SEQ ID NO: 1278
  CD80 v535 IgV

SEQ ID NO: 1539 - protein, 104 aa, Artificial Sequence
  CD80 v535 IgV
VIHVTKEVKEVATLSCGHNVSVEELAQTRIYWQKEKKMVLTMMSGDMNIWPEYKNRTIFDITNNLSTVIQALRPSDEGTYECVVLKYEKDGFKREHLAEVTLSV

SEQ ID NO: 1540 - protein, 107 aa, Artificial Sequence
  CD80 v535 IgV
VIHVTKEVKEVATLSCGHNVSVEELAQTRIYWQKEKKMVLTMMSGDMNIWPEYKNRTIFDITNNLSTVIQALRPSDEGTYECVVLKYEKDGFKREHLAEVTLSVKAD

SEQ ID NO: 1541 - protein, 208 aa, Artificial Sequence
  CD80 v536 ECD
VIHVTKEVKEVATLSCGHNVPVEELAQTRIYWQKEKKMVLTMMSGDMNIWPEYKNRTIFDITNNLSIVIQALRPSDEGTYECVVLKYEKGAFKREHLAEVTLSVKADFPTPSISDFEVPSSNIRRIICSASGGFPEPHLSWLENGEELNAINTTVSQDPETELYAVSSKLDFNMTTNHSFMCLIKYGHLRVNQTFNWNTTKQEHFPDN

SEQ ID NO: 1542 - protein, 101 aa, Artificial Sequence
  CD80 v536 IgV
VIHVTKEVKEVATLSCGHNVPVEELAQTRIYWQKEKKMVLTMMSGDMNIWPEYKNRTIFDITNNLSIVIQALRPSDEGTYECVVLKYEKGAFKREHLAEVT

SEQ ID NO: 1543 - protein, 104 aa, Artificial Sequence
  CD80 v536 IgV
VIHVTKEVKEVATLSCGHNVPVEELAQTRIYWQKEKKMVLTMMSGDMNIWPEYKNRTIFDITNNLSIVIQALRPSDEGTYECVVLKYEKGAFKREHLAEVTLSV

SEQ ID NO: 1544 - protein, 107 aa, Artificial Sequence
  CD80 v536IgV
VIHVTKEVKEVATLSCGHNVPVEELAQTRIYWQKEKKMVLTMMSGDMNIWPEYKNRTIFDITNNLSIVIQALRPSDEGTYECVVLKYEKGAFKREHLAEVTLSVKAD

SEQ ID NO: 1545 - DNA, 57 bp, Artificial Sequence
  Signal peptide
atggggtcaaccgccatcctcgccctcctcctggctgttctccaaggagtcagcgct

SEQ ID NO: 1546 - protein, 19 aa, Artificial Sequence
  VH Signal Peptide
MGSTAILALLLAVLQGVSA

SEQ ID NO: 1547 - protein, 18 aa, Artificial Sequence
  HSA signal peptide
MKWVTFISLLFLFSSAYS

SEQ ID NO: 1548 - protein, 22 aa, Artificial Sequence
  Ig kappa light chain
MDMRAPAGIFGFLLVLFPGYRS

SEQ ID NO: 1549 - protein, 19 aa, Artificial Sequence
  human azurocidin preprotein signal sequence
MTRLTVLALLAGLLASSRA

SEQ ID NO: 1550 - protein, 19 aa, Artificial Sequence
  IgG heavy chain signal peptide
MELGLSWIFLLAILKGVQC

SEQ ID NO: 1551 - protein, 19 aa, Artificial Sequence
  IgG heavy chain signal peptide
MELGLRWVFLVAILEGVQC

SEQ ID NO: 1552 - protein, 19 aa, Artificial Sequence
  IgG heavy chain signal peptide
MKHLWFFLLLVAAPRWVLS

SEQ ID NO: 1553 - protein, 19 aa, Artificial Sequence
  IgG heavy chain signal peptide
MDWTWRILFLVAAATGAHS

SEQ ID NO: 1554 - protein, 19 aa, Artificial Sequence
  IgG heavy chain signal peptide
MDWTWRFLFVVAAATGVQS

SEQ ID NO: 1555 - protein, 19 aa, Artificial Sequence
  IgG heavy chain signal peptide
MEFGLSWLFLVAILKGVQC

SEQ ID NO: 1556 - protein, 19 aa, Artificial Sequence
  IgG heavy chain signal peptide
MEFGLSWVFLVALFRGVQC

SEQ ID NO: 1557 - protein, 26 aa, Artificial Sequence
  IgG heavy chain signal peptide
MDLLHKNMKHLWFFLLLVAAPRWVLS

SEQ ID NO: 1558 - protein, 22 aa, Artificial Sequence
  IgG Kappa light chain signal sequence
MDMRVPAQLLGLLLLWLSGARC

SEQ ID NO: 1559 - protein, 22 aa, Artificial Sequence
  IgG Kappa light chain signal sequence
MKYLLPTAAAGLLLLAAQPAMA

SEQ ID NO: 1560 - protein, 17 aa, Artificial Sequence
  Gaussia luciferase
MGVKVLFALICIAVAEA

SEQ ID NO: 1561 - protein, 18 aa, Artificial Sequence
  Human albumin
MKWVTFISLLFLFSSAYS

SEQ ID NO: 1562 - protein, 18 aa, Artificial Sequence
  Human chymotrypsinogen
MAFLWLLSCWALLGTTFG

SEQ ID NO: 1563 - protein, 14 aa, Artificial Sequence
  Human interleukin-2
MQLLSCIALILALV

SEQ ID NO: 1564 - protein, 15 aa, Artificial Sequence
  Human trypsinogen-2
MNLLLILTFVAAAVA

SEQ ID NO: 1565 - protein, 245 aa, Artificial Sequence
  anti-CD19 scFv
DIQMTQTTSSLSASLGDRVTISCRASQDISKYLNWYQQKPDGTVKLLIYHTSRLHSGVPSRFSGSGSGTDYSLTISNLEQEDIATYFCQQGNTLPYTFGGGTKLEITGSTSGSGKPGSGEGSTKGEVKLQESGPGLVAPSQSLSVTCTVSGVSLPDYGVSWIRQPPRKGLEWLGVIWGSETTYYNSALKSRLTIIKDNSKSQVFLKMNSLQTDDTAIYYCAKHYYYGGSYAMDYWGQGTSVTVSS

SEQ ID NO: 1566 - protein, 71 aa, Artificial Sequence
  CD8-derived hinge and transmembrane domain
KPTTTPAPRPPTPAPTIASQPLSLRPEASRPAAGGAVHTRGLDFASDIYIWAPLAGTCGVLLLSLVITLYC

SEQ ID NO: 1567 - protein, 69 aa, Artificial Sequence
  CD8-derived hinge and transmembrane domain
AKPTTTPAPRPPTPAPTIASQPLSLRPEACRPAAGGAVHTRGLDFACDIYIWAPLAGTCGVLLLSLVIT

SEQ ID NO: 1568 - protein, 68 aa, Artificial Sequence
  CD8 hinge and transmembrane domain
KPTTTPAPRPPTPAPTIASQPLSLRPEACRPAAGGAVHTRGLDFACDIYIWAPLAGTCGVLLLSLVIT

SEQ ID NO: 1569 - protein, 112 aa, Artificial Sequence
  CD3-zeta signaling domain
RVKFSRSADAPAYQQGQNQLYNELNLGRREEYDVLDKRRGRDPEMGGKPRRKNPQEGLYNELQKDKMAEAYSEIGMKGERRRGKGHDGLYQGLSTATKDTYDALHMQALPPR

SEQ ID NO: 1570 - protein, 42 aa, Artificial Sequence
  4-1BB-derived costimulatory domain
KRGRKKLLYIFKQPFMRPVQTTQEEDGCSCRFPEEEEGGCEL

SEQ ID NO: 1571 - protein, 40 aa, Artificial Sequence
  CD28-derived costimulatory domain
SKRSRLLHSDYMNMTPRRPGPTRKHYQPYAPPRDFAAYRS

SEQ ID NO: 1572 - protein, 41 aa, Artificial Sequence
  CD28-derived costimulatory domain
RSKRSRLLHSDYMNMTPRRPGPTRKHYQPYAPPRDFAAYRS

SEQ ID NO: 1573 - protein, 44 aa, Artificial Sequence
  CD28-derived costimulatory domain
FWVRSKRSRLLHSDYMNMTPRRPGPTRKHYQPYAPPRDFAAYRS

SEQ ID NO: 1574 - protein, 20 aa, Artificial Sequence
  T2A
SGEGRGSLLTCGDVEENPGP

SEQ ID NO: 1575 - protein, 18 aa, Artificial Sequence
  T2A
EGRGSLLTCGDVEENPGP

SEQ ID NO: 1576 - protein, 21 aa, Artificial Sequence
  T2A
GSGEGRGSLLTCGDVEENPGP

SEQ ID NO: 1577 - protein, 22 aa, Artificial Sequence
  P2A
GSGATNFSLLKQAGDVEENPGP

SEQ ID NO: 1578 - protein, 232 aa, Artificial Sequence
  Blue fluorescent protein
SELIKENMHMKLYMEGTVDNHHFKCTSEGEGKPYEGTQTMRIKVVEGGPLPFAFDILATSFLYGSKTFINHTQGIPDFFKQSFPEGFTWERVTTYEDGGVLTATQDTSLQDGCLIYNVKIRGVNFTSNGPVMQKKTLGWEAFTETLYPADGGLEGRNDMALKLVGGSHLIANIKTTYRSKKPAKNLKMPGVYYVDYRLERIKEANNETYVEQHEVAVARYCDLPSKLGHKLN

SEQ ID NO: 1579 - protein, 232 aa, Artificial Sequence
  Blue fluorescent protein
SRSELIKENMHMKLYMEGTVDNHHFKCTSEGEGKPYEGTQTMRIKVVEGGPLPFAFDILATSFLYGSKTFINHTQGIPDFFKQSFPEGFTWERVTTYEDGGVLTATQDTSLQDGCLIYNVKIRGVNFTSNGPVMQKKTLWEAFTETLYPADGGLEGRNDMALKLVGGSHLIANIKTTYRSKKPAKNLKMPGVYYVDYRLERIKEANNETYVEQHEVAARYCDLPSKLGHKLN

SEQ ID NO: 1580 - protein, 237 aa, Artificial Sequence; identical to SEQ ID NO: 1248
  eGFP

SEQ ID NO: 1581 - protein, 237 aa, Artificial Sequence; identical to SEQ ID NO: 1249
  Green fluorescent protein

SEQ ID NO: 1582 - protein, 239 aa, Artificial Sequence; identical to SEQ ID NO: 1250
  eGFP

SEQ ID NO: 1583 - protein, 431 aa, Artificial Sequence
  antiCD19z chimeric antigen receptor
DIQMTQTTSSLSASLGDRVTISCRASQDISKYLNWYQQKPDGTVKLLIYHTSRLHSGVPSRFSGSGSGTDYSLTISNLEQEDIATYFCQQGNTLPYTFGGGTKLEITGSTSGSGKPGSGEGSTKGEVKLQESGPGLVAPSQSLSVTCTVSGVSLPDYGVSWIRQPPRKGLEWLGVIWGSETTYYNSALKSRLTIIKDNSKSQVFLKMNSLQTDDTAIYYCAKHYYYGGSYAMDYWGQGTSVTVSSAAAKPTTTPAPRPPTPAPTIASQPLSLRPEASRPAAGGAVHTRGLDFASDIYIWAPLAGTCGVLLLSLVITLYCRVKFSRSADAPAYQQGQNQLYNELNLGRREEYDVLDKRRGRDPEMGGKPRRKNPQEGLYNELQKDKMAEAYSEIGMKGERRRGKGHDGLYQGLSTATKDTYDALHMQALPPR

SEQ ID NO: 1584 - protein, 472 aa, Artificial Sequence
  2nd Gen CAR
DIQMTQTTSSLSASLGDRVTISCRASQDISKYLNWYQQKPDGTVKLLIYHTSRLHSGVPSRFSGSGSGTDYSLTISNLEQEDIATYFCQQGNTLPYTFGGGTKLEITGSTSGSGKPGSGEGSTKGEVKLQESGPGLVAPSQSLSVTCTVSGVSLPDYGVSWIRQPPRKGLEWLGVIWGSETTYYNSALKSRLTIIKDNSKSQVFLKMNSLQTDDTAIYYCAKHYYYGGSYAMDYWGQGTSVTVSSASAKPTTTPAPRPPTPAPTIASQPLSLRPEACRPAAGGAVHTRGLDFACDIYIWAPLAGTCGVLLLSLVITMHKRGRKKLLYIFKQPFMRPVQTTQEEDGCSCRFPEEEEGGCELRVKFSRSADAPAYQQGQNQLYNELNLGRREEYDVLDKRRGRDPEMGGKPRRKNPQEGLYNELQKDKMAEAYSEIGMKGERRRGKGHDGLYQGLSTATKDTYDALHMQALPPR

SEQ ID NO: 1585 - protein, 497 aa, Artificial Sequence
  2nd Gen CAR
DIQMTQTTSSLSASLGDRVTISCRASQDISKYLNWYQQKPDGTVKLLIYHTSRLHSGVPSRFSGSGSGTDYSLTISNLEQEDIATYFCQQGNTLPYTFGGGTKLEITGSTSGSGKPGSGEGSTKGEVKLQESGPGLVAPSQSLSVTCTVSGVSLPDYGVSWIRQPPRKGLEWLGVIWGSETTYYNSALKSRLTIIKDNSKSQVFLKMNSLQTDDTAIYYCAKHYYYGGSYAMDYWGQGTSVTVSSASAKPTTTPAPRPPTPAPTIASQPLSLRPEACRPAAGGAVHTRGLDFACDIYIWAPLAGTCGVLLLSLVITMHKRGRKKLLYIFKQPFMRPVQTTQEEDGCSCRFPEEEEGGCELRVKFSRSADAPAYQQGQNQLYNELNLGRREEYDVLDKRRGRDPEMGGKPRRKNPQEGLYNELQKDKMAEAYSEIGMKGERRRGKGHDGLYQGLSTATKDTYDALHMQALPPRGGRSGEGRGSLLTCGDVEENPGPSR

SEQ ID NO: 1586 - protein, 471 aa, Artificial Sequence
  2nd Gen CAR with CD28-derived costimulatory domain
DIQMTQTTSSLSASLGDRVTISCRASQDISKYLNWYQQKPDGTVKLLIYHTSRLHSGVPSRFSGSGSGTDYSLTISNLEQEDIATYFCQQGNTLPYTFGGGTKLEITGSTSGSGKPGSGEGSTKGEVKLQESGPGLVAPSQSLSVTCTVSGVSLPDYGVSWIRQPPRKGLEWLGVIWGSETTYYNSALKSRLTIIKDNSKSQVFLKMNSLQTDDTAIYYCAKHYYYGGSYAMDYWGQGTSVTVSSASAKPTTTPAPRPPTPAPTIASQPLSLRPEACRPAAGGAVHTRGLDFACDIYIWAPLAGTCGVLLLSLVITMHRSKRSRLLHSDYMNMTPRRPGPTRKHYQPYAPPRDFAAYRSRVKFSRSADAPAYQQGQNQLYNELNLGRREEYDVLDKRRGRDPEMGGKPRRKNPQEGLYNELQKDKMAEAYSEIGMKGERRRGKGHDGLYQGLSTATKDTYDALHMQALPPR

SEQ ID NO: 1587 - protein, 431 aa, Artificial Sequence
  antiCD19 chimeric antigen receptor CAR-2
DIQMTQTTSSLSASLGDRVTISCRASQDISKYLNWYQQKPDGTVKLLIYHTSRLHSGVPSRFSGSGSGTDYSLTISNLEQEDIATYFCQQGNTLPYTFGGGTKLEITGSTSGSGKPGSGEGSTKGEVKLQESGPGLVAPSQSLSVTCTVSGVSLPDYGVSWIRQPPRKGLEWLGVIWGSETTYYNSALKSRLTIIKDNSKSQVFLKMNSLQTDDTAIYYCAKHYYYGGSYAMDYWGQGTSVTVSSASAKPTTTPAPRPPTPAPTIASQPLSLRPEASRPAAGGAVHTRGLDFASDIYIWAPLAGTCGVLLLSLVITLYCRVKFSRSADAPAYQQGQNQLYNELNLGRREEYDVLDKRRGRDPEMGGKPRRKNPQEGLYNELQKDKMAEAYSEIGMKGERRRGKGHDGLYQGLSTATKDTYDALHMQALPPR

SEQ ID NO: 1588 - protein, 707 aa, Artificial Sequence
  antiCD19 chimeric antigen receptor CAR-2
MALPVTALLLPLALLLHAARPDIQMTQTTSSLSASLGDRVTISCRASQDISKYLNWYQQKPDGTVKLLIYHTSRLHSGVPSRFSGSGSGTDYSLTISNLEQEDIATYFCQQGNTLPYTFGGGTKLEITGSTSGSGKPGSGEGSTKGEVKLQESGPGLVAPSQSLSVTCTVSGVSLPDYGVSWIRQPPRKGLEWLGVIWGSETTYYNSALKSRLTIIKDNSKSQVFLKMNSLQTDDTAIYYCAKHYYYGGSYAMDYWGQGTSVTVSSASAKPTTTPAPRPPTPAPTIASQPLSLRPEASRPAAGGAVHTRGLDFASDIYIWAPLAGTCGVLLLSLVITLYCRVKFSRSADAPAYQQGQNQLYNELNLGRREEYDVLDKRRGRDPEMGGKPRRKNPQEGLYNELQKDKMAEAYSEIGMKGERRRGKGHDGLYQGLSTATKDTYDALHMQALPPRGSGEGRGSLLTCGDVEENPGPSRSELIKENMHMKLYMEGTVDNHHFKCTSEGEGKPYEGTQTMRIKVVEGGPLPFAFDILATSFLYGSKTFINHTQGIPDFFKQSFPEGFTWERVTTYEDGGVLTATQDTSLQDGCLIYNVKIRGVNFTSNGPVMQKKTLGWEAFTETLYPADGGLEGRNDMALKLVGGSHLIANIKTTYRSKKPAKNLKMPGVYYVDYRLERIKEANNETYVEQHEVAVARYCDLPSKLGHKLN

SEQ ID NO: 1589 - protein, 428 aa, Artificial Sequence
  antiCD19 chimeric antigen receptor CAR-1
DIQMTQTTSSLSASLGDRVTISCRASQDISKYLNWYQQKPDGTVKLLIYHTSRLHSGVPSRFSGSGSGTDYSLTISNLEQEDIATYFCQQGNTLPYTFGGGTKLEITGSTSGSGKPGSGEGSTKGEVKLQESGPGLVAPSQSLSVTCTVSGVSLPDYGVSWIRQPPRKGLEWLGVIWGSETTYYNSALKSRLTIIKDNSKSQVFLKMNSLQTDDTAIYYCAKHYYYGGSYAMDYWGQGTSVTVSSASAKPTTTPAPRPPTPAPTIASQPLSLRPEACRPAAGGAVHTRGLDFACDIYIWAPLAGTCGVLLLSLVITRVKFSRSADAPAYQQGQNQLYNELNLGRREEYDVLDKRRGRDPEMGGKPRRKNPQEGLYNELQKDKMAEAYSEIGMKGERRRGKGHDGLYQGLSTATKDTYDALHMQALPPR

SEQ ID NO: 1590 - protein, 706 aa, Artificial Sequence
  antiCD19 chimeric antigen receptor CAR-1
MALPVTALLLPLALLLHAARPGSDIQMTQTTSSLSASLGDRVTISCRASQDISKYLNWYQQKPDGTVKLLIYHTSRLHSGVPSRFSGSGSGTDYSLTISNLEQEDIATYFCQQGNTLPYTFGGGTKLEITGSTSGSGKPGSGEGSTKGEVKLQESGPGLVAPSQSLSVTCTVSGVSLPDYGVSWIRQPPRKGLEWLGVIWGSETTYYNSALKSRLTIIKDNSKSQVFLKMNSLQTDDTAIYYCAKHYYYGGSYAMDYWGQGTSVTVSSASAKPTTTPAPRPPTPAPTIASQPLSLRPEACRPAAGGAVHTRGLDFACDIYIWAPLAGTCGVLLLSLVITRVKFSRSADAPAYQQGQNQLYNELNLGRREEYDVLDKRRGRDPEMGGKPRRKNPQEGLYNELQKDKMAEAYSEIGMKGERRRGKGHDGLYQGLSTATKDTYDALHMQALPPRGGRSGEGRGSLLTCGDVEENPGPSRSELIKENMHMKLYMEGTVDNHHFKCTSEGEGKPYEGTQTMRIKVVEGGPLPFAFDILATSFLYGSKTFINHTQGIPDFFKQSFPEGFTWERVTTYEDGGVLTATQDTSLQDGCLIYNVKIRGVNFTSNGPVMQKKTLWEAFTETLYPADGGLEGRNDMALKLVGGSHLIANIKTTYRSKKPAKNLKMPGVYYVDYRLERIKEANNETYVEQHEVAARYCDLPSKLGHKLN

SEQ ID NO: 1591 - DNA, 8708 bp, Artificial Sequence
  anti-CD19 chimeric antigen receptor CAR-2
agcttaatgtagtcttatgcaatactcttgtagtcttgcaacatggtaacgatgagttagcaacatgccttacaaggagagaaaaagcaccgtgcatgccgattggtggaagtaaggtggtacgatcgtgccttattaggaaggcaacagacgggtctgacatggattggacgaaccactgaattgccgcattgcagagatattgtatttaagtgcctagctcgatacaataaacgggtctctctggttagaccagatctgagcctgggagctctctggctaactagggaacccactgcttaagcctcaataaagcttgccttgagtgcttcaagtagtgtgtgcccgtctgttgtgtgactctggtaactagagatccctcagacccttttagtcagtgtggaaaatctctagcagtggcgcccgaacagggacttgaaagcgaaagggaaaccagaggagctctctcgacgcaggactcggcttgctgaagcgcgcacggcaagaggcgaggggcggcgactggtgagtacgccaaaaattttgactagcggaggctagaaggagagagatgggtgcgagagcgtcagtattaagcgggggagaattagatcgcgatgggaaaaaattcggttaaggccagggggaaagaaaaaatataaattaaaacatatagtatgggcaagcagggagctagaacgattcgcagttaatcctggcctgttagaaacatcagaaggctgtagacaaatactgggacagctacaaccatcccttcagacaggatcagaagaacttagatcattatataatacagtagcaaccctctattgtgtgcatcaaaggatagagataaaagacaccaaggaagctttagacaagatagaggaagagcaaaacaaaagtaagaccaccgcacagcaagcggccgctgatcttcagacctggaggaggagatatgagggacaattggagaagtgaattatataaatataaagtagtaaaaattgaaccattaggagtagcacccaccaaggcaaagagaagagtggtgcagagagaaaaaagagcagtgggaataggagctttgttccttgggttcttgggagcagcaggaagcactatgggcgcagcctcaatgacgctgacggtacaggccagacaattattgtctggtatagtgcagcagcagaacaatttgctgagggctattgaggcgcaacagcatctgttgcaactcacagtctggggcatcaagcagctccaggcaagaatcctggctgtggaaagatacctaaaggatcaacagctcctggggatttggggttgctctggaaaactcatttgcaccactgctgtgccttggaatgctagttggagtaataaatctctggaacagatttggaatcacacgacctggatggagtgggacagagaaattaacaattacacaagcttaatacactccttaattgaagaatcgcaaaaccagcaagaaaagaatgaacaagaattattggaattagataaatgggcaagtttgtggaattggtttaacataacaaattggctgtggtatataaaattattcataatgatagtaggaggcttggtaggtttaagaatagtttttgctgtactttctatagtgaatagagttaggcagggatattcaccattatcgtttcagacccacctcccaaccccgaggggacccgacaggcccgaaggaatagaagaagaaggtggagagagagacagagacagatccattcgattagtgaacggatctcgacggtatcggttaacttttaaaagaaaaggggggattggggggtacagtgcaggggaaagaatagtagacataatagcaacagacatacaaactaaagaattacaaaaacaaattacaaaaattcaaaattttatcgatcacgagactagcctcgagaagcttgatatcgaattcccacggggttggacgcgtaggaacagagaaacaggagaatatgggccaaacaggatatctgtggtaagcagttcctgccccggctcagggccaagaacagttggaacagcagaatatgggccaaacaggatatctgtggtaagcagttcctgccccggctcagggccaagaacagatggtccccagatgcggtcccgccctcagcagtttctagagaaccatcagatgtttccagggtgccccaaggacctgaaatgaccctgtgccttatttgaactaaccaatcagttcgcttctcgcttctgttcgcgcgcttctgctccccgagctctatataagcagagctcgtttagtgaaccgtcagatcgcctggagacgccatccacgctgttttgacttccatagaaggatcccctgcaggtaatacgactcactatagggtccactgccgccaccatggctctgcctgtgacagctctgctgctgcctctggccctgctgctccatgccgccagacccggatccgatatccagatgacccagaccaccagcagcctgagcgccagcctgggcgatagagtgaccatcagctgcagagccagccaggacatcagcaagtacctgaactggtatcagcagaaacccgacggcaccgtgaagctgctgatctaccacaccagcagactgcacagcggcgtgcccagcagattttctggcagcggctccggcaccgactacagcctgaccatctccaacctggaacaggaagatatcgctacctacttctgtcagcaaggcaacaccctgccctacaccttcggcggaggcaccaagctggaaatcaccggcagcacaagcggcagcggcaagcctggatctggcgagggaagcaccaagggcgaagtgaaactgcaggaaagcggccctggactggtggccccaagccagtctctgagcgtgacctgtaccgtgtccggcgtgtccctgcctgactatggcgtgtcctggatcagacagccacccagaaagggcctggaatggctgggagtgatctggggcagcgagacaacctactacaacagcgccctgaagtcccggctgaccatcatcaaggacaactccaagagccaggtgttcctgaagatgaacagcctgcagaccgacgacaccgccatctactactgcgccaagcactactactacggcggcagctacgccatggactactggggccagggcacaagcgtgaccgtgtccagcgctagcgccaagcccaccacgacgccagcgccgcgaccaccaacaccggcgcccaccatcgcgtcgcagcccctgtccctgcgcccagaggcgagccggccagcggcggggggcgcagtgcacacgagggggctggacttcgccagtgatatctacatctgggcgcccctggccgggacttgtggggtccttctcctgtcactggttatcaccctttactgcagagtgaagttcagcaggagcgcagacgcccccgcgtaccagcagggccagaaccagctctataacgagctcaatctaggacgaagagaggagtacgatgttttggacaagagacgtggccgggaccctgagatggggggaaagccgagaaggaagaaccctcaggaaggcctgtacaatgaactgcagaaagataagatggcggaggcctacagtgagattgggatgaaaggcgagcgccggaggggcaaggggcacgatggcctttaccagggtctcagtacagccaccaaggacacctacgacgcccttcacatgcaggccctgccccctcgcggcagtggcgagggcagaggaagtctgctaacatgcggtgacgtggaggagaatccgggcccctctagaagcgagctgattaaggagaacatgcacatgaagctgtacatggagggcaccgtggacaaccatcacttcaagtgcacatccgagggcgaaggcaagccctacgagggcacccagaccatgagaatcaaggtggtcgagggcggccctctccccttcgccttcgacatcctggctactagcttcctctacggcagcaagaccttcatcaaccacacccagggcatccccgacttcttcaagcagtccttccctgagggcttcacatgggagagagtcaccacatacgaagacgggggcgtgctgaccgctacccaggacaccagcctccaggacggctgcctcatctacaacgtcaagatcagaggggtgaacttcacatccaacggccctgtgatgcagaagaaaacactcggctgggaggccttcaccgagacgctgtaccccgctgacggcggcctggaaggcagaaacgacatggccctgaagctcgtgggcgggagccatctgatcgcaaacatcaagaccacatatagatccaagaaacccgctaagaacctcaagatgcctggcgtctactatgtggactacagactggaaagaatcaaggaggccaacaacgagacctacgtcgagcagcacgaggtggcagtggccagatactgcgacctccctagcaaactggggcacaagcttaattgagtcgacaatcaacctctggattacaaaatttgtgaaagattgactggtattcttaactatgttgctccttttacgctatgtggatacgctgctttaatgcctttgtatcatgctattgcttcccgtatggctttcattttctcctccttgtataaatcctggttgctgtctctttatgaggagttgtggcccgttgtcaggcaacgtggcgtggtgtgcactgtgtttgctgacgcaacccccactggttggggcattgccaccacctgtcagctcctttccgggactttcgctttccccctccctattgccacggcggaactcatcgccgcctgccttgcccgctgctggacaggggctcggctgttgggcactgacaattccgtggtgttgtcggggaagctgacgtcctttccatggctgctcgcctgtgttgccacctggattctgcgcgggacgtccttctgctacgtcccttcggccctcaatccagcggaccttccttcccgcggcctgctgccggctctgcggcctcttccgcgtcttcgccttcgccctcagacgagtcggatctccctttgggccgcctccccgcctggaattcgagctcggtacctttaagaccaatgacttacaaggcagctgtagatcttagccactttttaaaagaaaaggggggactggaagggctaattcactcccaacgaagacaagatctgctttttgcttgtactgggtctctctggttagaccagatctgagcctgggagctctctggctaactagggaacccactgcttaagcctcaataaagcttgccttgagtgcttcaagtagtgtgtgcccgtctgttgtgtgactctggtaactagagatccctcagacccttttagtcagtgtggaaaatctctagcagtagtagttcatgtcatcttattattcagtatttataacttgcaaagaaatgaatatcagagagtgagaggaacttgtttattgcagcttataatggttacaaataaagcaatagcatcacaaatttcacaaataaagcatttttttcactgcattctagttgtggtttgtccaaactcatcaatgtatcttatcatgtctggctctagctatcccgcccctaactccgcccagttccgcccattctccgccccatggctgactaattttttttatttatgcagaggccgaggccgcctcggcctctgagctattccagaagtagtgaggaggcttttttggaggcctaggcttttgcgtcgagacgtacccaattcgccctatagtgagtcgtattacgcgcgctcactggccgtcgttttacaacgtcgtgactgggaaaaccctggcgttacccaacttaatcgccttgcagcacatccccctttcgccagctggcgtaatagcgaagaggcccgcaccgatcgcccttcccaacagttgcgcagcctgaatggcgaatggcgcgacgcgccctgtagcggcgcattaagcgcggcgggtgtggtggttacgcgcagcgtgaccgctacacttgccagcgccctagcgcccgctcctttcgctttcttcccttcctttctcgccacgttcgccggctttccccgtcaagctctaaatcgggggctccctttagggttccgatttagtgctttacggcacctcgaccccaaaaaacttgattagggtgatggttcacgtagtgggccatcgccctgatagacggtttttcgccctttgacgttggagtccacgttctttaatagtggactcttgttccaaactggaacaacactcaaccctatctcggtctattcttttgatttataagggattttgccgatttcggcctattggttaaaaaatgagctgatttaacaaaaatttaacgcgaattttaacaaaatattaacgtttacaatttcccaggtggcacttttcggggaaatgtgcgcggaacccctatttgtttatttttctaaatacattcaaatatgtatccgctcatgagacaataaccctgataaatgcttcaataatattgaaaaaggaagagtatgagtattcaacatttccgtgtcgcccttattcccttttttgcggcattttgccttcctgtttttgctcacccagaaacgctggtgaaagtaaaagatgctgaagatcagttgggtgcacgagtgggttacatcgaactggatctcaacagcggtaagatccttgagagttttcgccccgaagaacgttttccaatgatgagcacttttaaagttctgctatgtggcgcggtattatcccgtattgacgccgggcaagagcaactcggtcgccgcatacactattctcagaatgacttggttgagtactcaccagtcacagaaaagcatcttacggatggcatgacagtaagagaattatgcagtgctgccataaccatgagtgataacactgcggccaacttacttctgacaacgatcggaggaccgaaggagctaaccgcttttttgcacaacatgggggatcatgtaactcgccttgatcgttgggaaccggagctgaatgaagccataccaaacgacgagcgtgacaccacgatgcctgtagcaatggcaacaacgttgcgcaaactattaactggcgaactacttactctagcttcccggcaacaattaatagactggatggaggcggataaagttgcaggaccacttctgcgctcggcccttccggctggctggtttattgctgataaatctggagccggtgagcgtgggtctcgcggtatcattgcagcactggggccagatggtaagccctcccgtatcgtagttatctacacgacggggagtcaggcaactatggatgaacgaaatagacagatcgctgagataggtgcctcactgattaagcattggtaactgtcagaccaagtttactcatatatactttagattgatttaaaacttcatttttaatttaaaaggatctaggtgaagatcctttttgataatctcatgaccaaaatcccttaacgtgagttttcgttccactgagcgtcagaccccgtagaaaagatcaaaggatcttcttgagatcctttttttctgcgcgtaatctgctgcttgcaaacaaaaaaaccaccgctaccagcggtggtttgtttgccggatcaagagctaccaactctttttccgaaggtaactggcttcagcagagcgcagataccaaatactgtccttctagtgtagccgtagttaggccaccacttcaagaactctgtagcaccgcctacatacctcgctctgctaatcctgttaccagtggctgctgccagtggcgataagtcgtgtcttaccgggttggactcaagacgatagttaccggataaggcgcagcggtcgggctgaacggggggttcgtgcacacagcccagcttggagcgaacgacctacaccgaactgagatacctacagcgtgagctatgagaaagcgccacgcttcccgaagggagaaaggcggacaggtatccggtaagcggcagggtcggaacaggagagcgcacgagggagcttccagggggaaacgcctggtatctttatagtcctgtcgggtttcgccacctctgacttgagcgtcgatttttgtgatgctcgtcaggggggcggagcctatggaaaaacgccagcaacgcggcctttttacggttcctggccttttgctggccttttgctcacatgttctttcctgcgttatcccctgattctgtggataaccgtattaccgcctttgagtgagctgataccgctcgccgcagccgaacgaccgagcgcagcgagtcagtgagcgaggaagcggaagagcgcccaatacgcaaaccgcctctccccgcgcgttggccgattcattaatgcagctggcacgacaggtttcccgactggaaagcgggcagtgagcgcaacgcaattaatgtgagttagctcactcattaggcaccccaggctttacactttatgcttccggctcgtatgttgtgtggaattgtgagcggataacaatttcacacaggaaacagctatgaccatgattacgccaagcgcgcaattaaccctcactaaagggaacaaaagctggagctgca

SEQ ID NO: 1592 - DNA, 1356 bp, Artificial Sequence
  antiCD19 chimeric antigen receptor nucleotide
atggccttaccagtgaccgccttgctcctgccgctggccttgctgctccacgccgccaggccggacatccagatgacacagactacatcctccctgtctgcctctctgggagacagagtcaccatcagttgcagggcaagtcaggacattagtaaatatttaaattggtatcagcagaaaccagatggaactgttaaactcctgatctaccatacatcaagattacactcaggagtcccatcaaggttcagtggcagtgggtctggaacagattattctctcaccattagcaacctggagcaagaagatattgccacttacttttgccaacagggtaatacgcttccgtacacgttcggaggggggactaagttggaaataacaggctccacctctggatccggcaagcccggatctggcgagggatccaccaagggcgaggtgaaactgcaggagtcaggacctggcctggtggcgccctcacagagcctgtccgtcacatgcactgtctcaggggtctcattacccgactatggtgtaagctggattcgccagcctccacgaaagggtctggagtggctgggagtaatatggggtagtgaaaccacatactataattcagctctcaaatccagactgaccatcatcaaggacaactccaagagccaagttttcttaaaaatgaacagtctgcaaactgatgacacagccatttactactgtgccaaacattattactacggtggtagctatgctatggactactggggtcaaggaacctcagtcaccgtctcctcagcggccgcaaagcccaccacgacgccagcgccgcgaccaccaacaccggcgcccaccatcgcgtcgcagcccctgtccctgcgcccagaggcgagccggccagcggcggggggcgcagtgcacacgagggggctggacttcgccagtgatatctacatctgggcgcccctggccgggacttgtggggtccttctcctgtcactggttatcaccctttactgcagagtgaagttcagcaggagcgcagacgcccccgcgtaccagcagggccagaaccagctctataacgagctcaatctaggacgaagagaggagtacgatgttttggacaagagacgtggccgggaccctgagatggggggaaagccgagaaggaagaaccctcaggaaggcctgtacaatgaactgcagaaagataagatggcggaggcctacagtgagattgggatgaaaggcgagcgccggaggggcaaggggcacgatggcctttaccagggtctcagtacagccaccaaggacacctacgacgcccttcacatgcaggccctgccccctcgc

SEQ ID NO: 1593 - protein, 8 aa, Artificial Sequence
  Linker
SSGSGGSG

SEQ ID NO: 1594 - protein, 19 aa, Artificial Sequence
  P2A
ATNFSLLKQAGDVEENPGP

1. A method of treating a cancer in a subject, the method comprising:
(a) administering to a subject having a cancer a variant CD80-Fc fusion protein, wherein the variant CD80 fusion protein comprises (1) a variant CD80 extracellular domain or a portion thereof comprising an IgV domain and (2) an Fc domain, wherein the variant CD80 extracellular domain or the portion thereof comprises one or more amino acid substitutions at one or more positions in the sequence of amino acids of the extracellular domain or a portion thereof of an unmodified CD80 polypeptide,
wherein the variant CD80 fusion protein exhibits increased binding to PD-L1 compared to a fusion protein comprising the extracellular domain or portion thereof of the unmodified CD80 for PD-L1; and
(b) administering to the subject a therapeutically effective amount of an anti-cancer agent.

2. The method of claim 1, wherein the anti-cancer agent is an immune checkpoint inhibitor or a chemotherapeutic agent.

3-6. (canceled)

7. The method of claim 1, wherein the anti-cancer agent is an immune checkpoint inhibitor of PD-1 (PD-1 inhibitor).

8. A method of treating a cancer in a subject, the method comprising:
(a) administering to a subject having a cancer a variant CD80-Fc fusion protein, wherein the variant CD80-Fc fusion protein comprises (1) a variant CD80 extracellular domain or a portion thereof comprising an IgV domain and (2) an Fc domain, wherein the variant CD80 extracellular domain or the portion thereof comprises one or more amino acid substitutions at one or more positions in the sequence of amino acids of the extracellular domain or a portion thereof of an unmodified CD80 polypeptide,
wherein the variant CD80 fusion protein exhibits increased binding to PD-L1 compared to a fusion protein comprising the extracellular domain or portion thereof of the unmodified CD80 for PD-L1; and
(b) administering to the subject a therapeutically effective amount of a PD-1 inhibitor, wherein the PD-1 inhibitor disrupts the interaction between Programmed Death-1 (PD-1) and a ligand thereof.

9-12. (canceled)

13. The method of claim 8, wherein the PD-1 inhibitor is an antibody or antigen-binding fragment thereof that specifically binds to PD-1.

14. The method of claim 13, wherein the antibody or antigen-binding portion is selected from nivolumab, pembrolizumab, MEDI0680 (AMP514), PDR001, cemiplimab (REGN2810), pidilizumab (CT011), or an antigen-binding portion thereof.

15. The method of claim 8, wherein the PD-1 inhibitor is pembrolizumab.

16-22. (canceled)

23. The method of claim 8, wherein the variant CD80 fusion protein is administered subcutaneously.

24. The method of claim 8, wherein the variant CD80 fusion protein is administered intravenously.

25-31. (canceled)

32. A method of treating a cancer in a subject, the method comprising intratumorally administering to a subject having a cancer a therapeutically effective amount of a variant CD80-Fc fusion protein, wherein the variant CD80-Fc fusion protein comprises (1) a variant CD80 extracellular domain or a portion thereof comprising an IgV domain and (2) an Fc domain, wherein the variant CD80 extracellular domain or the portion thereof comprises one or more amino acid substitutions at one or more positions in the sequence of amino acids of the extracellular domain or a portion thereof of an unmodified CD80 polypeptide wherein the variant CD80 fusion protein exhibits increased binding to PD-L1 compared to a fusion protein comprising the extracellular domain or portion thereof of the unmodified CD80 for PD-L1.

33-42. (canceled)

43. The methods of claim 1, wherein the variant CD80-Fc fusion protein is administered in an amount of between 1.0 mg/kg to 10 mg/kg, inclusive, once every week (Q1W).

44. A method of treating a cancer in a subject, the method comprising administering to a subject having a cancer a variant CD80-Fc fusion protein in an amount of between about 1.0 mg/kg to 10 mg/kg, inclusive, once every week (Q1W), wherein the variant CD80-Fc fusion protein comprises (1) a variant CD80 extracellular domain or a portion thereof comprising an IgV domain and (2) a an Fc domain, wherein the variant CD80 extracellular domain or the portion thereof comprises one or more amino acid substitutions at one or more positions in the sequence of amino acids of the extracellular domain or a portion thereof of an unmodified CD80 polypeptide, wherein the variant CD80 fusion protein exhibits increased binding to PD-L1 compared to a fusion protein comprising the extracellular domain or portion thereof of the unmodified CD80 for PD-L1.

45. The method of claim 44, wherein the amount of the variant CD80 fusion protein administered Q1W is between about 1 mg/kg and about 3 mg/kg.

46. (canceled)

47. The method of claim 1, wherein the variant CD80-Fc fusion protein is administered in an amount between about 1.0 mg/kg and about 40 mg/kg, inclusive, once every three weeks (Q3W).

48. A method of treating a cancer in a subject, the method comprising administering to a subject having a cancer a variant CD80-Fc fusion protein in an amount of between about 1.0 mg/kg to 40 mg/kg, inclusive, once every three weeks (Q3W), wherein the variant CD80-Fc fusion protein comprises (1) a variant CD80 extracellular domain or a portion thereof comprising an IgV domain and (2) an Fc domain, wherein the variant CD80 extracellular domain or the portion thereof comprises one or more amino acid substitutions at one or more positions in the sequence of amino acids of the extracellular domain or a portion thereof of an unmodified CD80 polypeptide, wherein the variant CD80 fusion protein exhibits increased binding to PD-L1 compared to a fusion protein comprising the extracellular domain or portion thereof of the unmodified CD80 for PD-L1.

49. The method of claim 48, wherein the amount of the variant CD80 fusion protein administered Q3W is between about 3.0 mg/kg and about 10 mg/kg.

50-54. (canceled)

55. The method of claim 1, wherein prior to the administering, selecting a subject for treatment that has a tumor comprising cells surface positive for PD-L1 or CD28 and/or surface negative for a cell surface ligand selected from CD80 or CD86.

56. A method of treating a cancer in a subject, the method comprising administering a variant CD80-Fc fusion protein to a subject selected as having a tumor comprising cells surface negative for a cell surface ligand selected from CD80 or CD86, and/or surface positive for CD28, wherein the variant CD80-Fc fusion protein comprises (1) a variant CD80 extracellular domain or a portion thereof comprising an IgV domain and (1) an Fc domain, said variant CD80 extracellular domain or the portion thereof comprising one or more amino acid substitutions at one or more positions in the sequence of amino acids of the extracellular domain or a portion thereof of an unmodified CD80 polypeptide.

57-58. (canceled)

59. The method of claim 1, wherein the subject has been selected as having a tumor comprising cells surface positive for PD-L1.

60-67. (canceled)

68. The method of claim 1, wherein the one or more amino acid substitutions are selected from among H18Y, A26E, E35D, D46E, D46V, M47I, M47L, M47V, V68M, A71D, A71G, L85M, L85Q or D90G, with reference to numbering of SEQ ID NO:2, or a conservative amino acid substitution thereof.

69. (canceled)

70. The method of claim 1, wherein the one or more amino acid substitutions comprise H18Y/E35D, E35D/D46E, E35D/D46V, E35D/M47I, E35D/M47L, E35D/M47V, E35D/V68M, E35D/L85M, E35D/L85Q, D46E/M47I, D46E/M47L, D46E/M47V, D46V/M47I, D46V/M47L, D46V/M47L, D46E/V68M, D46V/V68M, H18Y/M47I, H18Y/M47L, H18Y/M47V, M47I/V68M, M47L/V68M or M47V/V68M, M47I/E85M, M47L/E85M, M47V/E85M, M47I/E85Q, M47L/E85Q or M47V/E85Q, with reference to numbering of SEQ ID NO:2.

71. The method of claim 1, wherein the one or more amino acid modifications comprise amino acid substitutions E35D/M47L/V68M, E35D/M47V/V68M or E35D/M47I/L70M.

72. The method of claim 1, wherein the one or more amino acid modifications comprise amino acid substitutions E35D/M47V/N48K/V68M/K89N, H18Y/A26E/E35D/M47I/V68M/A71G/D90G, E35D/D46E/M47V/V68M/D90G/K93E, or E35D/D46V/M47I/V68M/L850/E88D.

73-76. (canceled)

77. The method of claim 1, wherein the extracellular domain or portion thereof of the unmodified CD80 comprises (i) the sequence of amino acids set forth in SEQ ID NO:2, (ii) is a portion of (i) comprising an IgV domain.

78-81. (canceled)

82. The method of claim 1, wherein the variant CD80 extracellular domain or the portion thereof comprising the IgV domain comprises the sequence of amino acids 35-135 of SEQ ID NO:2 (SEQ ID NO:76) or 35-141 of SEQ ID NO:2 (SEQ ID NO:150) in which is contained the one or more amino acid substitutions.

83. The method of claim 1, wherein the variant CD80 extracellular domain or the portion thereof comprising the IgV domain is the sequence of amino acids 35-135 of SEQ ID NO:2 (SEQ ID NO:76) or 35-141 of SEQ ID NO:2 (SEQ ID NO:150) in which is contained the one or more amino acid substitutions.

84-85. (canceled)

86. The method of claim 1, wherein the amino acid sequence of the variant CD80 extracellular domain has at least or at least about 85%, sequence identity to the sequence of amino acids 35-135 of SEQ ID NO:2 (SEQ ID NO:76) or 35-141 of SEQ ID NO:2 (SEQ ID NO:150).

87-89. (canceled)

90. The method of claim 1, wherein the Fc region is a variant IgG1 Fc region comprising one or more amino acid substitutions in a wildtype Fc region, said variant Fc region exhibiting one or more effector function that is reduced compared to the wildtype Fc region.

91. The method of claim 90, wherein the Fc region comprises the amino acid substitution N297G, R292C/N297G/V302C, or L234A/L235E/G237A, each wherein the residue is numbered according to the EU index of Kabat.

92. The method of claim 90, wherein the Fc region is set forth in SEQ ID NO: 1508 or SEQ ID NO:1518.

93. The method of claim 90, wherein the variant CD80 extracellular domain or the portion comprising the IgV domain is linked to the Fc region via a linker.

94. The method of claim 93, wherein the linker is GSGGGGS (SEQ ID NO:1522), GS(G₄S)₃ (SEQ ID NO:1243) or GS(G₄S)₅ (SEQ ID NO:1244).

95. The method of claim 1, wherein the variant CD80 fusion protein is a homodimer of two variant CD80-Fc fusion proteins that are the same.

96. The method of claim 1, wherein the cancer is selected from the group consisting of melanoma, bladder cancer, leukemia, lymphoma, myeloma, liver cancer, brain cancer, renal cancer, breast cancer, pancreatic cancer, colorectal cancer, lung cancer, spleen cancer, cancer of the thymus or blood cells, prostate cancer, testicular cancer, ovarian cancer, uterine cancer, gastric carcinoma, a musculoskeletal cancer, a head and neck cancer, a gastrointestinal cancer, a germ cell cancer, or an endocrine and neuroendocrine cancer.

97. The method of claim 1, wherein the cancer is selected from the group consisting of melanoma, non-small cell lung cancer (NSCLC), renal cell carcinoma (RCC), gastric cancer, bladder cancer, diffuse large B-cell lymphoma (DLBCL), Hodgkin's lymphoma, ovarian cancer, head & neck squamous cell cancer (HNSCC), mesothelioma, and triple negative breast cancer (TNBC).

98-223. (canceled)
